(19) United States
(12) Patent Application Publication
(10) Pub. No.: US 2011/0177976 A1
(43) Pub. Date: Jul. 21, 2011

(54) METHODS FOR PROMOTING WEIGHT LOSS AND ASSOCIATED ARRAYS

(75) Inventors: Jeffrey I. Gordon, St. Louis, MO (US); Peter Turnbaugh, St. Louis, MO (US)

(73) Assignee: THE WASHINGTON UNIVERSITY, St. Louis, MO (US)

(21) Appl. No.: 13/002,137

(22) PCT Filed: Jun. 30, 2009
(86) PCT No.: PCT/US09/49253

§ 371 Date: Mar. 29, 2011

Related U.S. Application Data
(60) Provisional application No. 61/076,887, filed on Jun. 30, 2008.
(60) Provisional application No. 61/101,011, filed on Sep. 29, 2008.

(51) Int. Cl. C40B 40/08; C40B 40/10

(52) U.S. Cl. 506/17; 506/18

(57) ABSTRACT

Methods of modulating body fat or weight loss are presented Nucleic acid and protein microarrays that comprise biomolecules associated with an obese host microbiome or a lean host microbiome are utilized for analysis.

### CROSS REFERENCE TO RELATED APPLICATIONS

[0001] This application claims the priority of U.S. provisional application No. 61/076,887, filed Jun. 30, 2008, and provisional application No. 61/101,011, filed Sep. 29, 2008, each of which is hereby incorporated by reference in its entirety.

### GOVERNMENTAL RIGHTS

[0002] This invention was made in part with government support under grant DK078669 awarded by the National Institutes of Health. The government has certain rights in the invention.

### FIELD OF THE INVENTION

[0003] The present invention encompasses methods and arrays associated with body fat and/or weight loss.

### REFERENCE TO SEQUENCE LISTING

[0004] A paper copy of the sequence listing and a computer readable form of the same sequence listing are appended below and herein incorporated by reference. Additionally, the sequence listing filed with the provisional application is also hereby incorporated by reference.

### BACKGROUND OF THE INVENTION

[0005] According to the Centers for Disease Control (CDC), over sixty percent of the United States population is overweight, and greater than thirty percent are obese. This translates into more than 50 million adults in the United States with a Body Mass Index (BMI) of 30 or above. Obesity is also a worldwide health problem with an estimated 500 million overweight adult humans [body mass index (BMI) of 25.0-29.9 kg/m²] and 250 million obese adults (Bouchard, C (2000) N Engl J Med. 343, 1888-9). This epidemic of obesity is leading to worldwide increases in the prevalence of obesity-related disorders, such as diabetes, hypertension, cardiac pathology, and non-alcoholic fatty liver disease (NAFLD; Wanless, and Lentz (1990) Hepatology 12, 1106-1110. Silverman, et al, (1990). Am. J. Gastroenterol. 85, 1349-1355; Neuschwander-Tetri and, Caldwell (2003) Hepatology 37, 1202-1219). According to the National Institute of Diabetes, Digestive and Kidney Diseases (NIDDK) approximately 280,000 deaths annually are directly related to obesity. The NIDDK further estimated that the direct cost of healthcare in the U.S. associated with obesity is $51 billion. In addition, Americans spend $33 billion per year on weight loss products. In spite of this economic cost and consumer commitment, the prevalence of obesity continues to rise at alarming rates. From 1991 to 2000, obesity in the U.S. grew by 61%.

[0006] Although the physiologic mechanisms that support development of obesity are complex, the medical consensus is that the root cause relates to an excess intake of calories compared to caloric expenditure. While the treatment seems quite intuitive, dieting is not an adequate long-term solution for most people; about 90 to 95 percent of persons who lose weight subsequently regain it. Although surgical intervention has had some measured success, the various types of surgeries have relatively high rates of morbidity and mortality.

[0007] Pharmacotherapeutic principles are limited. In addition, because of undesirable side effects, the FDA has had to recall several obesity drugs from the market. Those that are approved also have side effects. Currently, two FDA-approved anti-obesity drugs are orlistat, a lipase inhibitor, and sibutramine, a serotonin reuptake inhibitor. Orlistat acts by blocking the absorption of fat into the body. An unpleasant side effect with orlistat, however, is the passage of undigested oily fat from the body. Sibutramine is an appetite suppressant that acts by altering brain levels of serotonin. In the process, it also causes elevation of blood pressure and an increase in heart rate. Other appetite suppressants, such as amphetamine derivatives, are highly addictive and have the potential for abuse. Moreover, different subjects respond differently and unpredictably to weight-loss medications.

[0008] Because surgical and pharmacotherapy treatments are problematic, new non-cognitive strategies are needed to prevent and treat obesity and obesity-related disorders.

### SUMMARY OF THE INVENTION

[0009] One aspect of the present invention encompasses an array comprising a substrate. The substrate has disposed thereon at least one nucleic acid indicative of, or modulated in, an obese host microbiome compared to a lean host microbiome. Alternatively, the substrate has disposed thereon at least one nucleic acid indicative of, or modulated in, a lean host microbiome compared to an obese host microbiome.

[0010] Another aspect of the present invention encompasses an array comprising a substrate. The substrate has disposed thereon at least one polypeptide indicative of, or modulated in, an obese host microbiome compared to a lean host microbiome. Alternatively, the substrate has disposed thereon at least one polypeptide indicative of, or modulated in, a lean host microbiome compared to an obese host microbiome.

[0011] Yet another aspect of the invention encompasses a method for modulating body fat or for modulating weight loss in a subject. The method typically comprises altering the microbiota population in the subject's gastrointestinal tract by modulating the relative abundance of Actinobacteria. In some embodiments, the relative abundance is increased, in other embodiments, the relative abundance is decreased.

[0012] Still another aspect of the invention encompasses a composition. The composition usually comprises an antibiotic having efficacy against Actinobacteria but not against Bacteroidetes; and a probiotic comprising Bacteroidetes.

[0013] Other aspects and iterations of the invention are described more thoroughly below.

### REFERENCE TO COLOR FIGURES

[0014] The application file contains at least one photograph executed in color. Copies of this patent application publication with color photographs will be provided by the Office upon request and payment of the necessary fee.

### BRIEF DESCRIPTION OF THE FIGURES

[0015] FIG. 1 depicts the technical replicates (analyzed at four different sequencing centers) cluster. Fecal DNA samples were split and sequenced separately at four different sequencing centers. Abbreviations: usc, Environmental Genomics Core Facility, University of South Carolina; ok, Advanced Center for Genome Technology, University of Oklahoma, ct; 454 Life Sciences Branford, Conn.; and ma, Josephine Bay Paul Center, Marine Biological Laboratory, Woods Hole Mass. Unweighted UniFrac-based clustering was performed on the combined dataset. Colored boxes enclose samples from the same individual (also indicated by identical IDs followed by the number 1 or 2. The location of the sequencing facility follows each sample ID.) Randomly selected sequences were analyzed (500 per replicate). FIGS. 1.1, 1.2, 1.3, 1.4, and 1.5 show details from FIG. 1.

[0016] FIG. 2 depicts 16S rRNA gene surveys revealing familial similarity and reduced diversity of the gut microbiota in obese individuals. (A) Comparison of the average UniFrac distance (a measure of differences in bacterial community structure) between individuals over time (self), twin-pairs, twins and their mother, and unrelated individuals. Briefly, 1,000 sequences were randomly sampled from each V2/3 dataset, OTUs were chosen, a UniFrac tree was built from representative sequences, and random permutations were done on the resulting UniFrac distance matrix. Asterisks indicate significant differences between the indicated categories [Student's t-test with Monte Carlo (1,000 permutations); *p<10-5; ** p<10-14; ***p<10-41]. (B) Evidence of reduced diversity in the fecal microbiota of obese individuals. Phylogenetic diversity curves were generated by randomly sampling 1 to 10,000 sequences from each V6 16S rRNA dataset, and then calculating the total branch length leading to the sampled sequences (mean±95% CI shown).

[0017] FIG. 3 depicts 16S rRNA gene surveys revealing evidence for familial aggregation and reduced diversity in the obese gut microbiome. (A,B) Comparison of the average UniFrac distance (a measure of differences in bacterial community structure) between related and unrelated individuals. Briefly, 10,000 sequences were randomly sampled from each V6 dataset (Panel A) and 200 sequences were randomly sampled from each full-length dataset (Panel B), OTUs were chosen, a UniFrac tree was built from representative sequences, and random permutations were done on the resulting UniFrac distance matrix. Asterisks indicate significant differences between related and unrelated individuals [Student's t-test with Monte Carlo (1,000 permutations); *p<0.001]. (C,D) Phylogenetic diversity curves for the obese and lean gut microbiome. Briefly, 1 to 1,000 sequences were randomly sampled from each V2/3 dataset (Panel C), and 1 to 200 sequences were randomly sampled from each full-length dataset (Panel D), and the average branch length leading to the sampled sequences was calculated. (E,F) Rarefaction curves for the obese and lean fecal microbiota. Briefly, 1 to 10,000 sequences were randomly sampled from each V6 dataset (Panel E), and 1 to 200 sequences were randomly sampled from each full-length dataset (Panel F). The average number of OTUs in each sample was then calculated (mean±95% CI shown).

[0018] FIG. 4 depicts a graph illustrating the stratification of related and unrelated individuals concordant for physiological states of obesity versus leanness confirms familial similarity. (A,B) Comparison of the average UniFrac distance (a measure of differences in bacterial community structure) between related and unrelated individuals concordant for leanness (Panel A) or obesity (Panel B). Briefly, 1,000 sequences were randomly sampled from each V2/3 dataset, OTUs were chosen, a UniFrac tree was built from representative sequences, and random permutations were done on the resulting UniFrac distance matrix. Asterisks indicate significant differences between related and unrelated individuals [Student's t-test with Monte Carlo (1,000 permutations); *p<10⁻⁵].

[0019] FIG. 5 depicts clustering of the fecal microbiotas of monozygotic (MZ) and dizygotic (DZ) twins and their mothers sampled at the beginning of the study and two months later. Unweighted UniFrac-based clustering. Colored boxes link samples from the same individual (also indicated by identical IDs followed by the number 1 or 2). 34 of the individuals were only sampled once. 1,000 randomly V2/3 16S rRNA gene sequences were analyzed per sample. FIGS. 5.1, 5.2, 5.3, 5.4, 5.5, and 5.6 show details from FIG. 5.

[0020] FIG. 6 depicts the relative abundance of the major gut bacterial phyla across 120 gut samples obtained at two different timepoints. Fecal samples were collected at the initial and second timepoints (average interval between sample collection: 57±4 days). The relative abundance of the major gut bacterial phyla is based on analysis of V2/3 16S rRNA gene sequences. Samples are organized based on the rank order abundance of Firmicutes in the initial timepoint.

[0021] FIG. 7 depicts the number of shared phylotypes (OTUs) as a function of the number of sequences per sample. 50-3,000 sequences were randomly selected from each sample, obtained from 93 different individuals. All sequences were binned into ‘species’-level phylotypes using a 97% identity threshold. Less stringent parameters were used for OTU binning at all levels of coverage to allow for analysis of 3,000 sequences per sample (density cutoff=0.65, maximum of 3000 nodes).

[0022] FIG. 8 depicts the validation of annotation parameters using control datasets. (A-C) Percent of randomly fragmented annotated genes (KEGG v44) assigned to the correct KEGG orthologous group as a function of the (A) e-value, (B) % identity, or (C) bit-score cutoff used. (D-F) Sensitivity [true positives (TP) divided by true positives plus false negatives (FN)] as a function of the (D) e-value, (E) % identity, or (F) bit-score cutoff used. (G-I) Precision [true positives divided by true positives plus false positives (FP)] as a function of the (G) e-value, (H) % identity, or (I) bit-score cutoff used. The vertical gray line and circle indicates the cutoff values used in this analysis.

[0023] FIG. 9 depicts the taxonomic profiles of microbial gene content in the human gut (fecal) microbiome. Full-length 16S sequences were obtained for each reference genome, likelihood parameters were determined using Modeltest, and a maximum-likelihood tree was generated using PAUP. Bootstrap values represent nodes found in >70 of 100 repetitions. Branches and distributions are colored by phylum: Bacteroidetes (orange), Firmicutes (blue), and Actinobacteria (green). Proteobacteria (E. coli) and Archaea (M. smithii and M. stadtmanae) are uncolored. The relative abundance of sequences homologous to each genome is depicted on a scale of 0 to 30% (BLASTX comparisons of microbiome datasets to reference genomes). Sample ID nomenclature: Family number, Twin number or mom, and BMI category (Le=lean, Ov=overweight, Ob=obese; e.g. F1T1Le stands for family 1, twin 1, lean).

[0024] FIG. 10 depicts the assignment of fecal microbiome reads to sequenced reference human gut-derived Bacteroidetes and Firmicutes genomes. Histogram of the percent identity (mean±SEM) obtained from sequence alignments between gut microbiome reads (n=18 datasets) and Firmicutes or Bacteroidetes reference genomes.

[0025] FIG. 11 depicts the percent identity plots of the fecal microbiomes versus reference genomes. Each row α-axis) represents a different genome. The y-axis shows the percent identity to microbiome sequences (red dots). The combined data from lean/overweight individuals are in the left column while the combined data from obese individuals are displayed in the right column. Supercontigs were used for draft genomes; the assembly version (v) can be found after the strain name. The lines found at 10% identity on each plot depict the sum of all sequences mapped across each genome.

[0026] FIG. 12 depicts the dependence of percentage (A), quality (B), and accuracy (C-D) of sequence assignments on read-length. Two fecal samples were processed using extra-long read pyrosequencing (454 FLX Titanium kit; samples TS28 and TS29). 10,000 sequences from the maximum of each read-length distribution (between 490 and 505 nt) were randomly selected from each sample. Simulated reads were created by sampling the first 50-500 nt of each of these 10,000 sequences, and each simulated read was compared using NCBI-BLASTX against our custom gut genome database. Multiple BLAST thresholds were used (see key in panel A). (A) Percent of sequences assigned to the reference genomes as a function of read-length. (B) Average BLAST bit score as a function of read-length. (C) Percent of gene assignments (from the gut genome database) identical to full-length sequence as a function of read-length. (D) Percent of group assignments (same assigned COG as the full-length sequence) as a function of read-length.

[0027] FIG. 13 depicts the relative abundance of bacterial phyla in 18 human gut microbiomes. (A-C) PCR-based 16S rRNA gene sequences [(A) full-length, (B) V2/3 region, and (C) V6]. (D-E) Microbiome data analyzed by BLAST comparisons [(D) NCBI non-redundant database and (E) a custom 42 gut genome database]. (F) Analysis of 16S rRNA gene fragments identified in each microbiome. (G) Correlation matrix based on all pairwise comparisons (R²) of the relative abundance of the four major phyla (Actinobacteria, Firmicutes, Bacteroidetes, and Proteobacteria) across all six methods.

[0028] FIG. 14 depicts the metabolic pathway-based clustering and analysis of the human gut microbiome of MZ twins. (A) Metabolic pathways were tallied using the KEGG database and annotation scheme. Functional profiles were clustered using a single-linkage hierarchical clustering with a Pearson's distance metric. All pairwise comparisons were made of the profiles by calculating each R² value. (B) A linear regression of the relative abundance of Bacteroidetes versus the first principal component derived from a PCA analysis of KEGG metabolic profiles. (C) Comparisons of functional similarity between twin pairs, between twins and their mother, and between unrelated individuals. Asterisks indicate significant differences (Student's t-test with Monte Carlo; p<0.01) and bars represent mean±SEM.

[0029] FIG. 15 depicts the functional profiles of MZ fecal microbiomes, based on the relative abundance of KEGG pathways, which stabilize after ˜20,000 sequences are collected for a given sample. Datasets were randomly subsampled between 500 and 25,000 sequences. The average functional similarity (R²) between the subsampled dataset and the full dataset is shown as a function of sequencing effort.

[0030] FIG. 16 depicts the KEGG pathways and Carbohydrate Active Enzymes (CAZy) families whose representation is significantly different between Firmicutes and Bacteroidetes bins. Sequences from each of the 18 fecal microbiomes were binned based on sequence homology to the custom 42-member reference human gut genome database. (A) The frequency of each KEGG pathway was tallied for each bin and significantly different pathways were identified using a bootstrap re-sampling analysis (Xipe v2.4). Significantly different pathways reaching at least 0.6% relative abundance in at least two microbiomes were clustered using single-linkage hierarchical clustering and the Pearson's correlation distance metric. (B) The relative abundance of CAZy families in the Bacteroidetes and Firmicutes sequence bins. Asterisks indicate significant differences (Mann-Whitney test, p<0.0001).

[0031] FIG. 17 depicts the functional clustering of phylum-wide sequence bins and reference genomes from 36 human gut-derived Bacteroidetes and Firmicutes. The frequency of each KEGG pathway in phylum-wide sequence bins, and in 10,000 ‘simulated reads’ generated from each of the reference genomes (Readsim v0.10; ref. 56), was tallied and pathways reaching at least 0.6% relative abundance in at least two fecal microbiomes were clustered using principal components analysis (PCA). An ‘average’ Firmicutes and Bacteroidetes genome was generated by pooling all reads generated from genomes within each phylum.

[0032] FIG. 18 depicts the comparison of taxonomic and functional variations in the human gut microbiome. (A) Relative abundance of major phyla across 18 fecal microbiomes from MZ twins and their mothers, based on BLASTX comparisons of microbiomes and the NCBI non-redundant database. (B) Relative abundance of COG categories across each sampled gut microbiome.

[0033] FIG. 19 depicts the relative abundance of KEGG pathways and COG categories in the gut microbiomes of 18 individuals (6 MZ twin pairs and their mothers), plus 9 previously published adult microbiomes. ‘Simulated reads’ were generated from each of the 9 previously published microbiomes datasets obtained by capillary sequencing to mimic pyrosequencing reads, then re-annotated using the KEGG and STRING-extended COG databases. (A) The average relative abundance of KEGG pathways in MZ twin pairs and their mothers graphed as a function of the average relative abundance of KEGG pathways in the 9 previously published adult gut microbiome datasets. (B) The distribution of COG categories across all 27 datasets.

[0034] FIG. 20 depicts the relative abundance of COG categories in 36 sequenced reference human gut-derived Firmicutes and Bacteroidetes genomes. 10,000 ‘simulated reads’, generated from each of the reference genomes (Readsim v0.10), were annotated using the STRING-extended COG database.

[0035] FIG. 21 depicts the average functional diversity and evenness of ‘simulated reads’ generated from reference genomes from gut Firmicutes or Bacteroidetes. (A) Functional diversity was calculated in EstimateS (v8.0), based on the abundance of each metabolic pathway across 10,000 ‘simulated reads’ generated from each of the 36 reference genomes (Readsim v0.10). (B) Shannon evenness. Asterisks indicate significant differences (Mann-Whitney test, p<0.01).

[0036] FIG. 22 depicts the ‘enzyme’-level functional groups shared between all or a subset of the sampled gut microbiomes. Sequences from each of the 18 microbiomes characterized in this study were assigned to (A) KEGG groups, (B) CAZy families, and (C) STRING annotations. Functional groups (inner circle), and the sequences assigned to each group (outer circle) were then tallied based on their co-occurrence in any combination of 1 to 18 microbiomes. For example, the outer aqua-colored segment in Panel A demonstrates that 96.2% of the total sequences generated from all 18 samples were assigned to functional grouips that were common to all 18 microbiomes. (D) KEGG categories enriched or depleted in the core versus variable components of the gut microbiome. Sequences from each of the 18 fecal microbiomes were binned into the ‘core’ or ‘variable’ microbiome-based on the co-occurrence of KEGG orthologous groups (core groups were found in all 18 microbiomes while variable groups were present in fewer (<18) microbiomes; see FIG. 20A). General categories are shown. Asterisks indicate significant differences (Student's t-test, *p<0.05, **p<0.001, ***p<10-5).

[0037] FIG. 23 depicts the KEGG categories enriched or depleted in the core versus variable components of the gut microbiome. Sequences from each of the 18 fecal microbiomes were binned into the ‘core’ or ‘variable’ microbiome based on the co-occurrence of KEGG orthologous groups (core groups were found in all 18 microbiomes while variable groups were present in fewer (<18) microbiomes; see FIG. 20A). General categories are shown. Asterisks indicate significant differences (Student's t-test, *p<0.05, **p<0.001, ***p<10-5).

[0038] FIG. 24 depicts the clustering of pathways enriched or depleted in the core microbiome. Sequences from each of the 18 distal gut microbiomes were binned into the ‘core’ or ‘variable’ microbiome based on the co-occurrence of KEGG orthologous groups [core groups were found in all 18 microbiomes while variable groups were present in fewer (<18) microbiomes; see FIG. 20A]. The frequency of each KEGG pathway was tallied for each bin and significantly different pathways were identified using a bootstrap re-sampling analysis (Xipe v2.4). Pathways significantly enriched (yellow) or depleted (blue), reaching at least 0.6% relative abundance in at least two microbiomes, were clustered using single-linkage hierarchical clustering and the Pearson's correlation distance metric.

### DETAILED DESCRIPTION OF THE INVENTION

[0039] It has been discovered, as demonstrated in the Examples, that there is a relationship between the human gut microbiota and obesity. In particular, an obese human subject typically has fewer Bacteroidetes and more Actinobacteria compared to a lean subject. In some embodiments, an obese human subject has proportionately fewer Bacteroidetes and more Actinobacteria and Firmicutes compared to a lean subject. Taking advantage of these discoveries, the present invention provides compositions and methods to regulate energy balance in a subject. In particular, the invention provides nucleic acid sequences that are associated with obesity in humans. These sequences may be used as diagnostic or prognostic biomarkers for obesity risk, biomarkers for drug discovery, biomarkers for the discovery of therapeutic targets involved in the regulation of energy balance, and biomarkers for the efficacy of a weight loss program.

### I. Modulation of Energy Balance in a Subject

[0040] The energy balance of a subject may be modulated by altering the subject's gut microbiota population. Generally speaking, to decrease energy harvesting, decrease body fat, or promote weight loss, the relative abundance of bacteria within the Bacteroidetes phylum (phylum is also known as a ‘division’) is increased and optionally, the relative abundance of bacteria within the Actinobacteria and/or Firmicutes phylum is decreased. Alternatively, to increase energy harvesting, to increase body fat, or promote weight gain, the relative abundance of Bacteroidetes is decreased and optionally, the relative abundance of Actinobacteria and/or Firmicutes is increased. Additional agents may also be utilized to achieve either weight loss or weight gain. Examples of these agents are detailed in section I(d).

(a) Altering the abundance of Bacteroides

[0041] The relative abundance of Bacteroidetes may be altered by increasing or decreasing the presence of one or more Bacteroidetes species that reside in the gut. Additionally, non-limiting examples of species may include B. thetaiotaomicron, B. vulgatus, B. ovatus, P. distasonis, B. uniformis, B. stercoris, B. eggerthii, B. merdae, and B. caccae. In one embodiment, the population of B. thetaiotaomicron is altered. In still another embodiment, the population of B. vulgatus is altered. In an additional embodiment, the population of B. ovatus is altered. In another embodiment, the population of P. distasonis is altered. In yet another embodiment, the population of B. uniformis is altered. In an additional embodiment, the population of B. stercoris is altered. In a further embodiment, the population of B. eggerthii is altered. In still another embodiment, the population of B. merdae is altered. In another embodiment, the population of B. caccae is altered. In a further embodiment, the species within the Bacteroidetes phylum may be as of yet unnamed.

[0042] The present invention also includes altering various combinations of Bacteroidetes species, such as at least two species, at least three species, at least four species, at least five species, at least six species, at least seven species, at least eight species, at least nine species, at least ten Bacteroidetes species, or more than ten species of Bacteroidetes. For example, the combination of B. thetaiotaomicron, B. vulgatus, B. ovatus, P. distasonis, and B. uniformis may be altered.

[0043] In an exemplary embodiment, the relative abundance of Bacteroidetes is increased to decrease energy harvesting, decrease body fat, or promote weight loss in a subject. Increased abundance of Bacteroidetes in the gut may be accomplished by several suitable means generally known in the art. In one embodiment, a food supplement that increases the abundance of Bacteroidetes may be administered to the subject. By way of example, one such food supplement is psyllium husks as described in U.S. Patent Application Publication No. 2006/0229905, which is hereby incorporated by reference in its entirety. In an exemplary embodiment, a probiotic comprising one or more Bacteroidetes species or strains may be administered to the subject. The amount of probiotic administered to the subject can and will vary depending upon the embodiment. The probiotic may comprise from about one thousand to about ten billion cfu/g (colony forming units per gram) of the total composition, or of the part of the composition comprising the probiotic. In one embodiment, the probiotic may comprise from about one hundred million to about 10 billion organisms. The probiotic microorganism may be in any suitable form, for example in a powdered dry form. In addition, the probiotic microorganism may have undergone processing in order for it to increase its survival. For example, the microorganism may be coated or encapsulated in a polysaccharide, fat, starch, protein or in a sugar matrix. Standard encapsulation techniques known in the art can be used. For example, techniques discussed in U.S. Pat. No. 6,190,591, which is hereby incorporated by reference in its entirety, may be used.

[0044] Alternatively, the relative abundance of Bacteroidetes is decreased to increase energy harvesting, increase body fat, or promote weight gain in a subject. Decreased abundance of Bacteroidetes in the gut may be accomplished by several suitable means generally known in the art. In one embodiment, an antibiotic having efficacy against Bacteroidetes may be administered. Generally speaking, antimicrobial agents may target several areas of bacterial physiology: protein translation, nucleic acid synthesis, cell wall synthesis or potentially, the polysaccharide acquisition machinery. In an exemplary embodiment, the antibiotic will have efficacy against Bacteriodetes but not against Firmicutes. The susceptibility of the targeted species to the selected antibiotics may be determined based on culture methods or genome screening.

[0045] It is contemplated that the abundance of gut Bacteroidetes within an individual subject may be altered (i.e., increased or decreased) from about a couple fold difference to about a hundred fold difference or more, depending on the desired result (i.e., increased energy harvesting (weight gain) or decreased energy harvesting (weight loss)) and the individual subject. A method for determining the relative abundance of gut Bacteroidetes is described in the examples, alternatively, an array of the invention, described below, may be used to determine the relative abundance.

[0046] Stated another way, it is contemplated that the abundance of gut Bacteroidetes within an individual subject may be altered (i.e., increased or decreased) from about 1% to about 100% or more depending on the desired result (i.e., increased energy harvesting (weight gain) or decreased energy harvesting (weight loss)) and the individual subject. For weight loss, the abundance may be altered by an increase of from about 20% to about 100%, from about 30% to about 100%, from about 40% to about 100%, from about 50% to about 100%, from about 60% to about 100%, from about 70% to about 100%, from about 80% to about 100%, or from about 90% to 100%. A method for determining the relative abundance of gut Bacteroidetes is described in the examples, alternatively, an array of the invention, described below, may be used to determine the relative abundance.

### (b) Altering the Abundance of Actinobacteria

[0047] The relative abundance of Actinobacteria may be altered by increasing or decreasing the presence of one or more species that reside in the gut. Representative, non-limiting species include B. longum, B. breve, B. catenulatum, B. dentium, B. gallicum, B. pseudocatenulatum, C. aerofaciens, C. stercoris, C. intestinalis, and S. variabile.

[0048] In an exemplary embodiment, the relative abundance of Actinobacteria is decreased to decrease energy harvesting, decrease body fat, or promote weight loss in a subject. Decreased abundance of Actinobacteria in the gut may be accomplished by several suitable means generally known in the art. In one embodiment, an antibiotic having efficacy against Actinobacteria may be administered. In an exemplary embodiment, the antibiotic will have efficacy against Actinobacteria but not against Bacteriodetes. The susceptibility of the targeted species to the selected antibiotics may be determined based on culture methods or genome screening.

[0049] Alternatively, the relative abundance of Actinobacteria is increased to increase energy harvesting, increase body fat, or promote weight gain in a subject. Increased abundance of Actinobacteria in the gut may be accomplished by several suitable means generally known in the art. In an exemplary embodiment, a probiotic comprising one or more Actinobacteria strains or species may be administered to the subject.

[0050] It is contemplated that the abundance of gut Actinobacteria may be altered (i.e., increased or decreased) from about a couple fold difference to about a hundred fold difference or more, depending on the desired result (i.e., increased energy harvesting (weight gain) or decreased energy harvesting (weight loss)). A method for determining the relative abundance of gut Actinobacteria is described in the examples.

[0051] Stated another way, it is contemplated that the abundance of gut Actinobacteria may be altered (i.e., increased or decreased) from about 1% to about 100% or more depending on the desired result (i.e., increased energy harvesting (weight gain) or decreased energy harvesting (weight loss)). For weight loss, the abundance may be altered by a decrease of from about 20% to about 100%, from about 30% to about 100%, from about 40% to about 100%, from about 50% to about 100%, from about 60% to about 100%, from about 70% to about 100%, from about 80% to about 100%, or from about 90% to 100%. A method for determining the relative abundance of gut Actinobacteria is described in the examples.

### (c) Altering the Abundance of Firmicutes

[0052] The relative abundance of Firmicutes may be altered by increasing or decreasing the presence of one or more species that reside in the gut. Representative species include species from Clostridia, Bacilli, and Mollicutes. In one embodiment, the relative abundance of one or more Clostridia species is altered. In another embodiment, the relative abundance of one or more Bacilli species is altered. In yet another embodiment, the relative abundance of one or more Mollicutes species is altered. It is also contemplated that the relative abundance of several species of Firmicutes may be altered without departing from the scope of the invention. By way of non-limiting examples, a combination of one or more Clostridia species, one or more Bacilli species, and one or more Mollicutes species may be altered. In a further embodiment, the species within the Firmicutes phylum may be as of yet unnamed.

[0053] In some embodiments, the Mollicutes class is altered. For instance, E. dolichum, E. cylindroides, E. biforme, or C. innocuum may be altered. In one embodiment, the species of the Mollicutes class may posses the genetic information to create a cell wall. In another embodiment, the species of the Mollicutes class may produce a cell wall. In a further embodiment, the species within the class Mollicutes may be as of yet unnamed.

[0054] In an exemplary embodiment, the relative abundance of Firmicutes is decreased to decrease energy harvesting, decrease body fat, or promote weight loss in a subject. Decreased abundance of Firmicutes in the gut may be accomplished by several suitable means generally known in the art. In one embodiment, an antibiotic having efficacy against Firmicutes may be administered. In an exemplary embodiment, the antibiotic will have efficacy against Firmicutes but not against Bacteriodetes. In another exemplary embodiment, the antibiotic will have efficacy against Mollicutes, but not Bacteriodetes. The susceptibility of the targeted species to the selected antibiotics may be determined based on culture methods or genome screening.

[0055] Alternatively, the relative abundance of Firmicutes is increased to increase energy harvesting, increase body fat, or promote weight gain in a subject. Increased abundance of Firmicutes in the gut may be accomplished by several suitable means generally known in the art. In an exemplary embodiment, a probiotic comprising Firmicutes may be administered to the subject.

[0056] It is contemplated that the abundance of gut Firmicutes may be altered (i.e., increased or decreased) from about a about a couple fold difference to about a hundred fold difference or more, depending on the desired result (i.e., increased energy harvesting (weight gain) or decreased energy harvesting (weight loss)). A method for determining the relative abundance of gut Firmicutes is described in the examples.

[0057] Stated another way, it is contemplated that the abundance of gut Firmicutes may be altered (i.e., increased or decreased) from about 1% to about 100% or more depending on the desired result (i.e., increased energy harvesting (weight gain) or decreased energy harvesting (weight loss)). For weight loss, the abundance may be altered by a decrease of from about 20% to about 100%, from about 30% to about 100%, from about 40% to about 100%, from about 50% to about 100%, from about 60% to about 100%, from about 70% to about 100%, from about 80% to about 100%, or from about 90% to 100%. A method for determining the relative abundance of gut Firmicutes is described in the examples.

### (d) Additional Weight Modulating Agents

[0058] Another aspect of the invention encompasses a combination therapy to regulate fat storage, energy harvesting, and/or weight loss or gain in a subject. In an exemplary embodiment, a combination for decreasing energy harvesting, decreasing body fat or for promoting weight loss is provided. For this embodiment, a composition comprising an antibiotic having efficacy against Firmicutes and/or Actinobacteria but not against Bacteroidetes; and a probiotic comprising Bacteroidetes may be administered to the subject. Additionally, an anti-archaeal compound may be included in the aforementioned composition to reduce the representation of gut methanogens and the efficiency of methanogenesis, thereby reducing the efficiency of fermentation of dietary polysaccharides by saccharolytic bacteria, such as Bacteroidetes. Other agents that may be included with the aforementioned composition are detailed below.

[0059] The compositions utilized in this invention may be administered by any number of routes including, but not limited to, oral, intravenous, intramuscular, intra-arterial, intramedullary, intrathecal, intraventricular, pulmonary, transdermal, subcutaneous, intraperitoneal, intranasal, enteral, topical, sublingual, or rectal means. The actual effective amounts of compounds comprising a weight loss composition of the invention can and will vary according to the specific compounds being utilized, the mode of administration, and the age, weight and condition of the subject. Dosages for a particular individual subject can be determined by one of ordinary skill in the art using conventional considerations. Those skilled in the art will appreciate that dosages may also be determined with guidance from Goodman & Gilman's The Pharmacological Basis of Therapeutics, Ninth Edition (1996), Appendix II, pp. 1707-1711 and from Goodman & Gilman's The Pharmacological Basis of Therapeutics, Tenth Edition (2001), Appendix II, pp. 475-493.

i. Fiaf Polypeptide

[0060] A composition of the invention for promoting weight loss may optionally include either increasing the amount of a Fiaf polypeptide or the activity of a Fiaf polypeptide. Typically, a suitable Fiaf polypeptide is one that can substantially inhibit LPL when administered to the subject. Several Fiaf polypeptides known in the art are suitable for use in the present invention. Generally speaking, the Fiaf polypeptide is from a mammal. By way of non-limiting example, suitable Fiaf polypeptides and nucleotides are delineated in Table A.

TABLE A

| Species | PubMed Ref. |
|---|---|
| Homo sapiens | NM_139314 |
| | NM_016109 |
| Mus musculus | NM_020581 |
| Rattus norvegicus | NM_199115 |
| Sus scrofa | AY307772 |
| Bos taurus | AY192008 |
| Pan troglodytes | AY411895 |

[0061] In certain aspects, a polypeptide that is a homolog, ortholog, mimic or degenerative variant of a Fiaf polypeptide is also suitable for use in the present invention. In particular, the subject polypeptide will typically inhibit LPL when administered to the subject. A variety of methods may be employed to determine whether a particular homolog, mimic or degenerative variant possesses substantially similar biological activity relative to a Fiaf polypeptide. Specific activity or function may be determined by convenient in vitro, cell-based, or in vivo assays, such as measurement of LPL activity in white adipose tissue. In order to determine whether a particular Fiaf polypeptide inhibits LPL, the procedure detailed in the examples of U.S. Patent Application No. 20050239706, which is hereby incorporated by reference in its entirety, may be followed.

[0062] Fiaf polypeptides suitable for use in the invention are typically isolated or pure and are generally administered as a composition in conjunction with a suitable pharmaceutical carrier, as detailed below. A pure polypeptide constitutes at least about 90%, preferably, 95% and even more preferably, at least about 99% by weight of the total polypeptide in a given sample.

[0063] The Fiaf polypeptide may be synthesized, produced by recombinant technology, or purified from cells using any of the molecular and biochemical methods known in the art that are available for biochemical synthesis, molecular expression and purification of the Fiaf polypeptides [see e.g., Molecular Cloning, A Laboratory Manual (Sambrook, et al. Cold Spring Harbor Laboratory), Current Protocols in Molecular Biology (Eds. Ausubel, et al., Greene Publ. Assoc., Wiley-Interscience, New York)].

[0064] The invention also contemplates use of an agent that increases Fiaf transcription or its activity. For example, an agent may be delivered that specifically activates Fiaf expression: this agent may be a natural or synthetic compound that directly activates Fiaf gene transcription, or indirectly activates expression through interactions with components of host regulatory networks that control Fiaf transcription. Suitable agents may be identified by methods generally known in the art, such as by screening natural product and/or chemical libraries using the gnotobiotic zebrafish model described in the examples of U.S. Patent Application No. 20050239706. In another embodiment, a chemical entity may be used that interacts with Fiaf targets, such as LPL, to reproduce the effects of Fiaf (e.g., in this case inhibition of LPL activity). In an alternative of this embodiment, administering a Fiaf agonist to the subject may increase Fiaf expression and/or activity. In one embodiment, the Fiaf agonist is a peroxisome proliferator-activated receptor (PPARs) agonist. Suitable PPARs include PPARα, PPARβ/δ, and PPARγ. Fenofibrate is another suitable example of a Fiaf agonist. Additional suitable Fiaf agonists and methods of administration are further described in Manards, et al., J. Biol Chem, 279, 34411 (2004), and U.S. Patent Publication No. 2003/0220373, which are both hereby incorporated by reference in their entirety.

ii. Other Compounds

[0065] The compositions of the invention that decrease energy harvesting, decrease body fat, or promote weight loss may also include several additional agents suitable for use in weight loss regimes. Generally speaking, exemplary combinations of therapeutic agents may act synergistically to decrease energy harvesting, decrease body fat, or promote weight loss. Using this approach, one may be able to achieve therapeutic efficacy with lower dosages of each agent, thus reducing the potential for adverse side effects. In one embodiment, acarbose may be administered with a composition of the invention. Acarbose is an inhibitor of α-glucosidases and is required to break down carbohydrates into simple sugars within the gastrointestinal tract of the subject. In another embodiment, an appetite suppressant, such as an amphetamine, or a selective serotonin reuptake inhibitor, such as sibutramine, may be administered with a composition of the invention. In still another embodiment, a lipase inhibitor such as orlistat, or an inhibitor of lipid absorption such as Xenical, may be administered with a composition of the invention.

iii. Restricted Calorie Diet

[0066] Optionally, in addition to administration of a composition of the invention for weight loss, a subject may also be placed on a restricted calorie diet. Restricted calorie diets maybe helpful for increasing the relative abundance of Bacteroidetes and decreasing the relative abundance of Firmicutes and/or Actinobacteria. Several restricted calorie diets known in the art are suitable for use in combination with the compositions of the invention. Representative diets include a reduced fat diet, reduced protein, or a reduced carbohydrate diet.

iv. Alteration of the Gastrointestinal Archaeon Population

[0067] An anti-archaeal compound may be included in a composition of the invention to decrease energy harvesting, decrease fat storage, and/or decrease weight gain. To promote weight loss in a subject, the gut archaeon population is altered such that microbial-mediated carbohydrate metabolism or its efficiency is decreased in the subject, whereby decreasing microbial-mediated carbohydrate metabolism or its efficiency promotes weight loss in the subject.

[0068] Accordingly, in one embodiment, the subject's gastrointestinal archaeal population is altered so as to promote weight loss in the subject. Typically, the presence of at least one genera of archaeon that resides in the gastrointestinal tract of the subject is decreased. In most embodiments, the archaeon is generally a mesophilic methanogenic archaea. In one alternative of this embodiment, the presence of at least one species from the genera Methanobrevibacter or Methanosphaera is decreased. In another alternative embodiment, the presence of Methanobrevibacter smithii is decreased. In still another embodiment, the presence of Methanosphaera stadtmanae is decreased. In yet another embodiment, the presence of a combination of archaeon genera or species is decreased. By way of non-limiting example, the presence of Methanobrevibacter smithii and Methanosphaera stadtmanae is decreased.

[0069] To decrease the presence of any of the archaeon detailed above, methods generally known in the art may be utilized. In one embodiment, a compound having anti-microbial activities against the archaeon is administered to the subject. Non-limiting examples of suitable anti-microbial compounds include metronidzaole, clindamycin, timidazole, macrolides, and fluoroquinolones. In another embodiment, a compound that inhibits methanogenesis by the archaeon is administered to the subject. Non-limiting examples include 2-bromoethanesulfonate (inhibitor of methyl-coenzyme M reductase), N-alkyl derivatives of para-aminobenzoic acid (inhibitor of tetrahydromethanopterin biosynthesis), ionophore monensin, nitroethane, lumazine, propynoic acid and ethyl 2-butynoate. In yet another embodiment, a hydroxymethylglutaryl-CoA reductase inhibitor is administered to the subject. Non-limiting examples of suitable hydroxymethylglutaryl-CoA reductase inhibitors include lovastatin, atorvastatin, fluvastatin, pravastatin, simvastatin, and rosuvastatin. Alternatively, the diet of the subject may be formulated by changing the composition of glycans (e.g., polyfructose-containing oligosaccharides) in the diet that are preferred by polysaccharide degrading bacterial components of the microbiota (e.g., Bacteroides spp) when in the presence of mesophilic methanogenic archaeal species such as Methanobrevibacter smithii.

[0070] Generally speaking, when the archaeal population in the subject's gastrointestinal tract is decreased in accordance with the methods described above, the polysaccharide degrading properties of the subject's gastrointestinal microbiota is altered such that microbial-mediated carbohydrate metabolism or its efficiency is decreased. Typically, depending upon the embodiment, the transcriptome and the metabolome of the gastrointestinal microbiota is altered. In one embodiment, the microbe is a saccharolytic bacterium. In one alternative of this embodiment, the saccharolytic bacterium is a Bacteroides species. In a further alternative embodiment, the bacterium is Bacteroides thetaiotaomicron. Typically, the carbohydrate will be a plant polysaccharide or dietary fiber. Plant polysaccharides may include starch, fructan, cellulose, hemicellulose, and pectin.

[0071] The compounds utilized in this invention to alter the archaeon population may be administered by any number of routes including, but not limited to, oral, intravenous, intramuscular, intra-arterial, intramedullary, intrathecal, intraventricular, pulmonary, transdermal, subcutaneous, intraperitoneal, intranasal, enteral, topical, sublingual, or rectal means.

[0072] The actual effective amounts of compound described herein can and will vary according to the specific composition being utilized, the mode of administration and the age, weight and condition of the subject. Dosages for a particular individual subject can be determined by one of ordinary skill in the art using conventional considerations. Those skilled in the art will appreciate that dosages may also be determined with guidance from Goodman & Gilman's The Pharmacological Basis of Therapeutics, Ninth Edition (1996), Appendix II, pp. 1707-1711 and from Goodman & Gilman's The Pharmacological Basis of Therapeutics, Tenth Edition (2001), Appendix II, pp. 475-493.

[0073] By way of non-limiting example, weight loss may be promoted by administering an HMG-CoA reductase inhibitor to a subject. In an exemplary embodiment, the inhibitor will selectively inhibit the HMG-CoA reductase expressed by M. smithii and not the HMG-CoA reductase expressed by the subject. In another embodiment, a second HMG CoA-reductase inhibitor may be administered that selectively inhibits the HMG CoA-reductase expressed by the subject in lieu of the HMG-CoA reductase expressed by M. smithii. In yet another embodiment, an HMG-CoA reductase inhibitor that selectively inhibits the HMG-CoA reductase expressed by the subject may be administered in combination with an HMG-CoA reductase inhibitor that selectively inhibits the HMG-CoA reducase expressed by M. smithii. One means that may be utilized to achieve such selectivity is via the use of time-release formulations as discussed below or by otherwise altering the properties of the compounds so that they will not, or will, be efficiently absorbed from the gastrointestinal tract. Alternatively, the compound that selectively inhibits the HMG-CoA reductase expressed by M. smithii may be poorly absorbed by gastrointestinal tract of the subject. Compounds that inhibit HMG-CoA reductase are well known in the art. For instance, non-limiting examples include atorvastatin, pravastatin, rosuvastatin, and other statins.

[0074] These compounds, for example HMG-CoA reductase inhibitors, may be formulated into pharmaceutical compositions and administered to subjects to promote weight loss. According to the present invention, a pharmaceutical composition includes, but is not limited to, pharmaceutically acceptable salts, esters, salts of such esters, or any other adduct or derivative which upon administration to a subject in need is capable of providing, directly or indirectly, a composition as otherwise described herein, or a metabolite or residue thereof, e.g., a prodrug.

[0075] The pharmaceutical compositions maybe administered by several different means that will deliver a therapeutically effective dose. Such compositions can be administered orally, parenterally, by inhalation spray, rectally, intradermally, intracisternally, intraperitoneally, transdermally, bucally, as an oral or nasal spray, or topically (i.e. powders, ointments or drops) in dosage unit formulations containing conventional nontoxic pharmaceutically acceptable carriers, adjuvants, and vehicles as desired. Topical administration may also involve the use of transdermal administration such as transdermal patches or iontophoresis devices. The term parenteral as used herein includes subcutaneous, intravenous, intramuscular, or intrasternal injection, or infusion techniques. In an exemplary embodiment, the pharmaceutical composition will be administered in an oral dosage form. Formulation of drugs is discussed in, for example, Hoover, John E., Remington's Pharmaceutical Sciences, Mack Publishing Co., Easton, Pa. (1975), and Liberman, H. A. and Lachman, L., Eds., Pharmaceutical Dosage Forms, Marcel Decker, New York, N.Y. (1980).

[0076] The amount of an HMG-CoA reductase inhibitor that constitutes an “effective amount” can and will vary. The amount will depend upon a variety of factors, including whether the administration is in single or multiple doses, and individual subject parameters including age, physical condition, size, and weight. Those skilled in the art will appreciate that dosages may also be determined with guidance from Goodman & Goldman's The Pharmacological Basis of Therapeutics, Ninth Edition (1996), Appendix II, pp. 1707-1711 and from Goodman & Goldman's The Pharmacological Basis of Therapeutics, Tenth Edition (2001), Appendix II, pp. 475-493.

[0077] As described above, an HMG-CoA reductase inhibitor may be specific for the M. smithii enzyme, or for the subject's enzyme, depending, in part, on the selectivity of the particular inhibitor and the area the inhibitor is targeted for release in the subject. For example, an inhibitor may be targeted for release in the upper portion of the gastrointestinal tract of a subject to substantially inhibit the subject's enzyme. In contrast, the inhibitor may be targeted for release in the lower portion of the gastrointestinal tract of a subject, i.e., where M. smithii resides, then the inhibitor may substantially inhibit M. smithii's enzyme.

[0078] In order to selectively control the release of an inhibitor to a particular region of the gastrointestinal tract for release, the pharmaceutical compositions of the invention may be manufactured into one or several dosage forms for the controlled, sustained or timed release of one or more of the ingredients. In this context, typically one or more of the ingredients forming the pharmaceutical composition is microencapsulated or dry coated prior to being formulated into one of the above forms. By varying the amount and type of coating and its thickness, the timing and location of release of a given ingredient or several ingredients (in either the same dosage form, such as a multi-layered capsule, or different dosage forms) may be varied.

[0079] In an exemplary embodiment, the coating may be an enteric coating. The enteric coating generally will provide for controlled release of the ingredient, such that drug release can be accomplished at some generally predictable location in the lower intestinal tract below the point at which drug release would occur without the enteric coating. In certain embodiments, multiple enteric coatings may be utilized. Multiple enteric coatings, in certain embodiments, may be selected to release the ingredient or combination of ingredients at various regions in the lower gastrointestinal tract and at various times.

[0080] As will be appreciated by a skilled artisan, the encapsulation or coating method can and will vary depending upon the ingredients used to form the pharmaceutical composition and coating, and the desired physical characteristics of the microcapsules themselves. Additionally, more than one encapsulation method may be employed so as to create a multi-layered microcapsule, or the same encapsulation method may be employed sequentially so as to create a multi-layered microcapsule. Suitable methods of microencapsulation may include spray drying, spinning disk encapsulation (also known as rotational suspension separation encapsulation), supercritical fluid encapsulation, air suspension microencapsulation, fluidized bed encapsulation, spray cooling/chilling (including matrix encapsulation), extrusion encapsulation, centrifugal extrusion, coacervation, alginate beads, liposome encapsulation, inclusion encapsulation, colloidosome encapsulation, sol-gel microencapsulation, and other methods of microencapsulation known in the art. Detailed information concerning materials, equipment and processes for preparing coated dosage forms may be found in Pharmaceutical Dosage Forms: Tablets, eds. Lieberman et al. (New York: Marcel Dekker, Inc., 1989), and in Ansel et al., Pharmaceutical Dosage Forms and Drug Delivery Systems, 6th Ed. (Media, Pa.: Williams & Wilkins, 1995).

### II. Biomarkers Comprising the Gut Microbiome

[0081] Another aspect of the invention encompasses use of the gut microbiome as a biomarker for obesity. The biomarker may be utilized to construct arrays that may be used for several applications including as a diagnostic or prognostic tool to determine obesity risk, judge the efficacy of existing weight loss regimes, aid in drug discovery, identify additional biomarkers involved in obesity or an obesity related disorder, and aid in the discovery of therapeutic targets involved in the regulation of energy balance, including but not limited to those that may directly affect the composition of the gut microbiome. Generally speaking, the array may comprise biomolecules modulated in an obese host microbiome or a lean host microbiome.

### (a) Array

[0082] The array may be comprised of a substrate having disposed thereon at least one biomolecule that is modulated in an obese host microbiome compared to a lean host microbiome. Several substrates suitable for the construction of arrays are known in the art, and one skilled in the art will appreciate that other substrates may become available as the art progresses. The substrate may be a material that may be modified to contain discrete individual sites appropriate for the attachment or association of the biomolecules and is amenable to at least one detection method. Non-limiting examples of substrate materials include glass, modified or functionalized glass, plastics (including acrylics, polystyrene and copolymers of styrene and other materials, polypropylene, polyethylene, polybutylene, polyurethanes, TeflonJ, etc.), nylon or nitrocellulose, polysaccharides, nylon, resins, silica or silica-based materials including silicon and modified silicon, carbon, metals, inorganic glasses and plastics. In an exemplary embodiment, the substrates may allow optical detection without appreciably fluorescing.

[0083] A substrate may be planar, a substrate may be a well, i.e. a 364 well plate, or alternatively, a substrate may be a bead. Additionally, the substrate may be the inner surface of a tube for flow-through sample analysis to minimize sample volume. Similarly, the substrate may be flexible, such as a flexible foam, including closed cell foams made of particular plastics.

[0084] The biomolecule or biomolecules may be attached to the substrate in a wide variety of ways, as will be appreciated by those in the art. The biomolecule may either be synthesized first, with subsequent attachment to the substrate, or may be directly synthesized on the substrate. The substrate and the biomolecule may be derivatized with chemical functional groups for subsequent attachment of the two. For example, the substrate may be derivatized with a chemical functional group including, but not limited to, amino groups, carboxyl groups, oxo groups or thiol groups. Using these functional groups, the biomolecule may be attached using functional groups on the biomolecule either directly or indirectly using linkers.

[0085] The biomolecule may also be attached to the substrate non-covalently. For example, a biotinylated biomolecule can be prepared, which may bind to surfaces covalently coated with streptavidin, resulting in attachment. Alternatively, a biomolecule or biomolecules may be synthesized on the surface using techniques such as photopolymerization and photolithography. Additional methods of attaching biomolecules to arrays and methods of synthesizing biomolecules on substrates are well known in the art, i.e. VLSIPS technology from Affymetrix (e.g., see U.S. Pat. No. 6,566,495, and Rockett and Dix, “DNA arrays: technology, options and toxicological applications,” Xenobiotica 30(2):155-177, all of which are hereby incorporated by reference in their entirety).

[0086] In one embodiment, the biomolecule or biomolecules attached to the substrate are located at a spatially defined address of the array. Arrays may comprise from about 1 to about several hundred thousand addresses or more. In one embodiment, the array may be comprised of less than 10,000 addresses. In another alternative embodiment, the array may be comprised of at least 10,000 addresses. In yet another alternative embodiment, the array may be comprised of less than 5,000 addresses. In still another alternative embodiment, the array may be comprised of at least 5,000 addresses. In a further embodiment, the array may be comprised of less than 500 addresses. In yet a further embodiment, the array may be comprised of at least 500 addresses.

[0087] A biomolecule may be represented more than once on a given array. In other words, more than one address of an array may be comprised of the same biomolecule. In some embodiments, two, three, or more than three addresses of the array may be comprised of the same biomolecule. In certain embodiments, the array may comprise control biomolecules and/or control addresses. The controls may be internal controls, positive controls, negative controls, or background controls.

[0088] The array may be comprised of biomolecules indicative of an obese host microbiome (e.g. the nucleic acid sequences listed in Table 13). Alternatively, the array may be comprised of biomolecules indicative of a lean host microbiome (e.g. the nucleic acid sequences listed in Table 14). A biomolecule is “indicative” of an obese or lean microbiome if it tends to appear more often in one type of microbiome compared to the other. Additionally, the array may be comprised of biomolecules that are modulated in the obese host microbiome compared to the lean host microbiome. As used herein, “modulated” may refer to a biomolecule whose representation or activity is different in an obese host microbiome compared to a lean host microbiome. For instance, modulated may refer to a biomolecule that is enriched, depleted, up-regulated, down-regulated, degraded, or stabilized in the obese host microbiome compared to a lean host microbiome. In one embodiment, the array may be comprised of a biomolecule enriched in the obese host microbiome compared to the lean host microbiome. In another embodiment, the array may be comprised of a biomolecule depleted in the obese host microbiome compared to the lean host microbiome. In yet another embodiment, the array may be comprised of a biomolecule up-regulated in the obese host microbiome compared to the lean host microbiome. In still another embodiment, the array may be comprised of a biomolecule down-regulated in the obese host microbiome compared to the lean host microbiome. In still yet another embodiment, the array may be comprised of a biomolecule degraded in the obese host microbiome compared to the lean host microbiome. In an alternative embodiment, the array may be comprised of a biomolecule stabilized in the obese host microbiome compared to the lean host microbiome.

[0089] Generally speaking, an array of the invention may comprise at least one biomolecule indicative of, or modulated in, an obese host microbiome compared to a lean host microbiome. In one embodiment, the array may comprise at least 5, 10, 15, 20, 25, 30, 35, 40, 45, 50, 55, 60, 65, 70, 75, 80, 85, 90, 95, 100, 105, 110, 115, 120, 125, 130, 135, 140, 145, 150, 155, 160, 165, 170, 175, 180, 185, 190, 195, 200, 205, 210, 215, 220, 225, 230, 235, 240, 245, 250, 255, 260, 275, 280, 285, 290, 295, 300, 305, 310, 315, 320, 325, 330, 335, 340, 345, 350, 355, 360, 365, 370, 375, 380, 385, 390, 395, or 400 biomolecules indicative of, or modulated in, an obese host microbiome compared to a lean host microbiome. In another embodiment, the array may comprise at least 200, at least 300, at least 400, at least 500, at least 600, at least 700, at least 800, or at least 900 biomolecules indicative of, or modulated in, an obese host microbiome compared to a lean host microbiome.

[0090] As used herein, “biomolecule” may refer to a nucleic acid, an oligonucleic acid, an amino acid, a peptide, a polypeptide, a protein, a lipid, a carbohydrate, a metabolite, or a fragment thereof. Nucleic acids may include RNA, DNA, and naturally occurring or synthetically created derivatives. A biomolecule may be present in, produced by, or modified by a microorganism within the gut.

[0091] In one embodiment, the biomolecules of the array may be selected from the biomolecules listed in Table 13. For instance, the biomolecules of the array may be selected from the group comprising nucleic acids corresponding to SEQ ID NO:1 through SEQ ID NO:273. In another embodiment, the biomolecules of the array may be selected from the biomolecules listed in Table 14. For instance, the biomolecules of the array may be selected from the group comprising nucleic acids corresponding to SEQ ID NO:274 through SEQ ID NO:383. In yet another embodiment, the biomolecules of the array may be selected from the biomolecules listed in Table 13 and Table 14, for instance, the nucleic acids corresponding to SEQ ID NO:1 through SEQ ID NO:383.

[0092] Additionally, the biomolecule may be at least 70, 75, 80, 85, 90, or 95% homologous to a biomolecule listed in Table 13 or Table 14 above. In one embodiment, the biomolecule may be at least 80, 81, 82, 83, 84, 85, 86, 87, 88, or 89% homologous to a biomolecule derived from an accession number detailed above. In another embodiment, the biomolecule may be at least 90, 91, 92, 93, 94, 95, 96, 97, 98, or 99% homologous to a biomolecule derived from an accession number detailed above.

[0093] In determining whether a biomolecule is substantially homologous or shares a certain percentage of sequence identity with a sequence of the invention, sequence similarity may be defined by conventional algorithms, which typically allow introduction of a small number of gaps in order to achieve the best fit. In particular, “percent identity” of two polypeptides or two nucleic acid sequences is determined using the algorithm of Karlin and Altschul (Proc. Natl. Acad. Sci. USA 87:2264-2268, 1993). Such an algorithm is incorporated into the BLASTN and BLASTX programs of Altschul et al. (J. Mol. Biol. 215:403-410, 1990). BLAST nucleotide searches may be performed with the BLASTN program to obtain nucleotide sequences homologous to a nucleic acid molecule of the invention. Equally, BLAST protein searches may be performed with the BLASTX program to obtain amino acid sequences that are homologous to a polypeptide of the invention. To obtain gapped alignments for comparison purposes, Gapped BLAST is utilized as described in Altschul et al. (Nucleic Acids Res. 25:3389-3402, 1997). When utilizing BLAST and Gapped BLAST programs, the default parameters of the respective programs (e.g., BLASTX and BLASTN) are employed. See http://www.ncbi.nlm.nih.gov for more details.

[0094] For each of the above embodiments, methods of determining biomolecules that are indicative of, or modulated in, an obese host microbiome compared to a lean host microbiome may be determined using methods detailed in the Examples.

[0095] The arrays may be utilized in several suitable applications. For example, the arrays may be used in methods for detecting association between two or more biomolecules. This method typically comprises incubating a sample with the array under conditions such that the biomolecules comprising the sample may associate with the biomolecules attached to the array. The association is then detected, using means commonly known in the art, such as fluorescence. “Association,” as used in this context, may refer to hybridization, covalent binding, or ionic binding. A skilled artisan will appreciate that conditions under which association may occur will vary depending on the biomolecules, the substrate, and the detection method utilized. As such, suitable conditions may have to be optimized for each individual array created.

[0096] In yet another embodiment, the array may be used as a tool in a method to determine whether a compound has efficacy for treatment of obesity or an obesity-related disorder in a host. Alternatively, the array may be used as a tool in a method to determine whether a compound increases or decreases the relative abundance of Bacteriodes, Actinobacteria, or Firmicutes in a subject. Typically, such methods comprise comparing a plurality of biomolecules of the host's microbiome before and after administration of a compound, such that if the abundance of biomolecules associated with obesity decreased after treatment, or the abundance of biomolecules indicative of Bacteroides increases, or the abundance of biomolecules indicative of Firmicutes and/or Actinobacteria decreases, the compound may be efficacious in treating obesity in a host.

[0097] The array may also be used to quantitate the plurality of biomolecules of the host microbiome before and after administration of a compound. The abundance of each biomolecule in the plurality may then be compared to determine if there is a decrease in the abundance of biomolecules associated with obesity after treatment.

[0098] In some embodiments, the array may be used as a diagnostic or prognostic tool to identify subjects that are susceptible to more efficient energy harvesting, and therefore, more susceptible to weight gain and/or obesity. Such a method may generally comprise incubating the array with biomolecules derived from the subject's gut microbiome to determine the relative abundance of nucleic acids or nucleic acid products associated with Bacteroidetes, Actinobacteria, or Firmictues. In some embodiments, the array may be used to determine the relative abundance of Mollicutes, Mollicute-associated nucleic acids, or Mollicute-associated nucleic acid products in a subject's gut microbiome. Methods to collect, isolate, and/or purify biomolecules from the gut microbiome of a subject to be used in the above methods are known in the art, and are detailed in the examples.

### (b) Microbiome Profiles

[0099] The present invention also encompasses use of the microbiome as a biomarker to construct microbiome profiles. Generally speaking, a microbiome profile is comprised of a plurality of values with each value representing the abundance of a microbiome biomolecule. The abundance of a microbiome biomolecule may be determined, for instance, by sequencing the nucleic acids of the microbiome as detailed in the examples. This sequencing data may then be analyzed by known software, as detailed in the examples, to determine the abundance of a microbiome biomolecule in the analyzed sample. The abundance of a microbiome biomolecule may also be determined using an array described above. For instance, by detecting the association between a biomolecules comprising a microbiome sample and the biomolecules comprising the array, the abundance of a microbiome biomolecule in the sample may be determined.

[0100] A profile may be digitally-encoded on a computer-readable medium. The term “computer-readable medium” as used herein refers to any medium that participates in providing instructions to a processor for execution. Such a medium may take many forms, including but not limited to non-volatile media, volatile media, and transmission media. Non-volatile media may include, for example, optical or magnetic disks. Volatile media may include dynamic memory. Transmission media may include coaxial cables, copper wire and fiber optics. Transmission media may also take the form of acoustic, optical, or electromagnetic waves, such as those generated during radio frequency (RF) and infrared (IR) data communications. Common forms of computer-readable media include, for example, a floppy disk, a flexible disk, hard disk, magnetic tape, or other magnetic medium, a CD-ROM, CDRW, DVD, or other optical medium, punch cards, paper tape, optical mark sheets, or other physical medium with patterns of holes or other optically recognizable indicia, a RAM, a PROM, and EPROM, a FLASH-EPROM, or other memory chip or cartridge, a carrier wave, or other medium from which a computer can read.

[0101] A particular profile may be coupled with additional data about that profile on a computer readable medium. For instance, a profile may be coupled with data about what therapeutics, compounds, or drugs may be efficacious for that profile, or about other features of the subject's digestive health when consuming a given diet or set of diets. Conversely, a profile may be coupled with data about what therapeutics, compounds, or drugs may not be efficacious for that profile. Alternatively, a profile may be coupled with known risks associated with that profile. Non-limiting examples of the type of risks that might be coupled with a profile include disease or disorder risks associated with a profile. The computer readable medium may also comprise a database of at least two distinct profiles.

[0102] Such a profile may be used, for instance, in a method of selecting a compound for treating obesity or an obesity-related disorder in a host. Generally speaking, such a method would comprise providing a microbiome profile from the host and providing a plurality of reference microbiome profiles, each associated with a compound, and selecting the reference profile most similar to the host microbiome profile, to thereby select a compound for treating obesity or an obesity-related disorder in the host. The host profile and each reference profile may comprise a plurality of values, each value representing the abundance of a microbiome biomolecule.

[0103] The microbiome profiles may be utilized in a variety of applications. For example, the microbiome profiles may be used in a method for predicting risk for obesity or an obesity-related disorder in a host. The method comprises, in part, providing a microbiome profile from a host, and providing a plurality of reference microbiome profiles, then selecting the reference profile most similar to the host microbiome profile, such that if the host's microbiome is most similar to a reference obese microbiome, the host is at risk for obesity or an obesity-related disorder. The microbiome profile from the host may be determined using an array of the invention. The reference profiles may be stored on a computer-readable medium such that software known in the art and detailed in the examples may be used to compare the microbiome profile and the reference profiles.

[0104] The host microbiome may be derived from a subject that is a rodent, a human, a livestock animal, a companion animal, or a zoological animal. In one embodiment, the host microbiome is derived from a rodent, i.e. a mouse, a rat, a guinea pig, etc. In another embodiment, the host microbiome is derived from a human. In a yet another embodiment the host microbiome is derived from a livestock animal. Non-limiting examples of livestock animals include pigs, cows, horses, goats, sheep, llamas and alpacas. In still another embodiment, the host microbiome is derived from a companion animal. Non-limiting examples of companion animals include pets, such as dogs, cats, rabbits, and birds. In still yet another embodiment, the host microbiome is derived from a zoological animal. As used herein, a “zoological animal” refers to an animal that may be found in a zoo. Such animals may include non-human primates, large cats, wolves, and bears.

### III. Kits

[0105] The present invention also encompasses a kit for evaluating a compound, therapeutic, or drug. Typically, the kit comprises an array and a computer-readable medium. The array may comprise a substrate, the substrate having disposed thereon at least one biomolecule that is modulated in an obese host microbiome compared to a lean host microbiome. The computer-readable medium may have a plurality of digitally-encoded profiles wherein each profile of the plurality has a plurality of values, each value representing the abundance of a biomolecule in a host microbiome detected by the array. The array may be used to determine a profile for a particular host under particular conditions, and then the computer-readable medium may be used to determine if the profile is similar to known profile stored on the computer-readable medium. Non-limiting examples of possible known profiles include obese and lean profiles for several different hosts, for example, rodents, humans, livestock animals, companion animals, or zoological animals.

### DEFINITIONS

[0106] The term “abundance” refers to the representation of a given taxonomic group (e.g. phylum, order, family, genera, or species) of microorganism present in the gastrointestinal tract of a subject.

[0107] The term “activity of the microbiota population” refers to the microbiome's ability to harvest energy and nutrients.

[0108] The term “antagonist” refers to a molecule that inhibits or attenuates the biological activity of a Fiaf polypeptide and in particular, the ability of Fiaf to inhibit LPL, and/or the ability of the microbiota to regulate Fiaf. Antagonists may include proteins such as antibodies, nucleic acids, carbohydrates, small molecules, or other compounds or compositions that modulate the activity of a Fiaf polypeptide either by directly interacting with the polypeptide or by acting on components of the biological pathway in which Fiaf participates.

[0109] The term “agonist” refers to a molecule that enhances or increases the biological activity of a Fiaf polypeptide and in particular, the ability of Fiaf to inhibit LPL. Agonists may include proteins, peptides, nucleic acids, carbohydrates, small molecules (e.g., such as metabolites), or other compounds or compositions that modulate the activity of a Fiaf polypeptide either by directly interacting with the polypeptide or by acting on components of the biological pathway in which Fiaf participates.

[0110] The term “altering” as used in the phrase “altering the microbiota population” is to be construed in its broadest interpretation to mean a change in the representation of microbes or the functions/activities of microbial communities in the gastrointestinal tract of a subject. The change may be a decrease or an increase in the presence of a particular microbial species, genus, family, order, or class, or change in the expression of microbial community associated nucleic acids or a change in the protein and metabolic products produced by members of the community.

[0111] “BMI” as used herein is defined as a human subject's weight (in kilograms) divided by height (in meters) squared.

[0112] An “effective amount” is a therapeutically-effective amount that is intended to qualify the amount of agent that will achieve the goal of a decrease in body fat, or in promoting weight loss.

[0113] Fas stands for fatty acid synthase.

[0114] Fiaf stands for fasting-induced adipocyte factor, also known as angiopoietin like protein 4 (Angpltl4).

[0115] LPL stands for lipoprotein lipase.

[0116] The term “obesity-related disorder” includes disorders resulting from, at least in part, obesity. Representative disorders include metabolic syndrome, type II diabetes, hypertension, cardiovascular disease, and nonalcoholic fatty liver disease.

[0117] The term “metagenomics” refers to the application of modern genomic techniques to the study of the composition and operations of communities of microbial organisms sampled directly in their natural environments, by passing the need for isolation and lab cultivation of individual species.

[0118] PPAR stands for peroxisome proliferator-activator receptor.

[0119] A “subject in need of treatment for obesity” generally will have at least one of three criteria: (i) BMI over 30; (ii) 100 pounds overweight; or (iii) 100% above an “ideal” body weight as determined by generally recognized weight charts.

[0120] As various changes could be made in the above compounds, products and methods without departing from the scope of the invention, it is intended that all matter contained in the above description and in the examples given below, shall be interpreted as illustrative and not in a limiting sense.

[0121] The following examples are included to demonstrate preferred embodiments of the invention. It should be appreciated by those of skill in the art that the techniques disclosed in the examples that follow represent techniques discovered by the inventors to function well in the practice of the invention. Those of skill in the art should, however, in light of the present disclosure, appreciate that many changes can be made in the specific embodiments that are disclosed and still obtain a like or similar result without departing from the spirit and scope of the invention. Therefore all matter set forth or shown in the accompanying drawings is to be interpreted as illustrative and not in a limiting sense.

### EXAMPLES

[0122] The following examples illustrate various iterations of the invention.

### Example 1

### The Gut Microbiota is Linked to Family and BMI

[0123] The bacterial lineages of the human gut microbiota are largely unexplored. In this study, the lineages of gut microbiota of 31 monozygotic (MZ) twin pairs, 23 dizygotic (DZ) twin pairs, and where available their mothers (n=46), were characterized. (Tables 1-5). MZ and DZ co-twins and parent-offspring pairs provide an attractive paradigm for assessing the impact of genotype and shared early environment exposures on the gut microbiome. Moreover, genetically ‘identical’ MZ twin pairs gain weight in response to overfeeding in a more reproducible way than do unrelated individuals and are more concordant for body mass index (BMI) than dizygotic twin pairs, suggesting shared features of their energy balance influenced by host genotype.

TABLE 1
V2/31 165 rRNA gene sequencing statistics

| | Data | | | | | | | |
|---|---|---|---|---|---|---|---|---|
| | ID | | | | | | Months | |
| | time- | Family | Twin/ | | | BMI | without | Total |
| Subject ID | point | number | Mom | Ancestry | Zygosity | category | Antibiotics | sequences |
| F1T1Le1 | TS1 | 1 | Twin | EA | MZ | Lean | >6 | 6415 |
| F1T1Le2 | TS1.2 | 1 | Twin | EA | MZ | Lean | >6 | 1627 |
| F1T2Le1 | TS2 | 1 | Twin | EA | MZ | Lean | NA | 15495 |
| F1T2Le2 | TS2.2 | 1 | Twin | EA | MZ | Lean | >6 | 1957 |
| F1MOv1 | TS3 | 1 | Mom | EA | NA | Overweight | >6 | 7870 |
| F1MOv2 | TS3.2 | 1 | Mom | EA | NA | Overweight | >6 | 1799 |
| F2T1Le1 | TS4 | 2 | Twin | EA | MZ | Lean | >6 | 9343 |
| F2T1Le2 | TS4.2 | 2 | Twin | EA | MZ | Lean | >6 | 2886 |
| F2T2Le1 | TS5 | 2 | Twin | EA | MZ | Lean | >6 | 13991 |
| F2T2Le2 | TS5.2 | 2 | Twin | EA | MZ | Lean | >6 | 3606 |
| F2MOb1 | TS6 | 2 | Mom | EA | NA | Obese | >6 | 7717 |
| F2MOb2 | TS6.2 | 2 | Mom | EA | NA | Obese | >6 | 4325 |
| F3T1Le1 | TS7 | 3 | Twin | EA | MZ | Lean | >6 | 11808 |
| F3T1Le2 | TS7.2 | 3 | Twin | EA | MZ | Lean | >6 | 2962 |
| F3T2Le1 | TS8 | 3 | Twin | EA | MZ | Lean | >6 | 16793 |
| F3T2Le2 | TS8.2 | 3 | Twin | EA | MZ | Lean | >6 | 632 |
| F3Mov1 | TS9 | 3 | Mom | EA | NA | Overweight | >6 | 11291 |
| F3MOb2 | TS9.2 | 3 | Mom | EA | NA | Obese | >6 | 2965 |
| F4T1Ob1 | TS10 | 4 | Twin | AA | MZ | Obese | >6 | 2280 |
| F4T1Ob2 | TS10.2 | 4 | Twin | AA | MZ | Obese | >6 | 979 |
| F4T2Ob1 | TS11 | 4 | Twin | AA | MZ | Obese | >6 | 2458 |
| F4T2Ob2 | TS11.2 | 4 | Twin | AA | MZ | Obese | >6 | 2437 |
| F4MOb1 | TS12 | 4 | Mom | AA | NA | Obese | >1 | 2086 |
| F4MOb2 | TS12.2 | 4 | Mom | AA | NA | Obese | >2 | 1692 |
| F5T1Le1 | TS13 | 5 | Twin | EA | MZ | Lean | >6 | 8509 |
| F5T1Le2 | TS13.2 | 5 | Twin | EA | MZ | Lean | >6 | 1689 |
| F5T2Le1 | TS14 | 5 | Twin | EA | MZ | Lean | >6 | 15903 |
| F5MOv1 | TS15 | 5 | Mom | EA | NA | Overweight | >6 | 15690 |
| F5MOv2 | TS15.2 | 5 | Mom | EA | NA | Overweight | >6 | 3967 |
| F5T1Le1 | TS16 | 6 | Twin | EA | MZ | Lean | NA | 5975 |
| F5T2Le1 | TS17 | 6 | Twin | EA | MZ | Lean | >6 | 1182 |
| F7T1Ob1 | TS19 | 7 | Twin | EA | MZ | Obese | >6 | 21459 |
| F7T1Ob2 | TS19.2 | 7 | Twin | EA | MZ | Obese | >6 | 3953 |
| F7T2Ob1 | TS20 | 7 | Twin | EA | MZ | Obese | >6 | 32871 |
| F7T2Ob2 | TS20.2 | 7 | Twin | EA | MZ | Obese | >6 | 5045 |
| F7MOb1 | TS21 | 7 | Mom | EA | NA | Obese | >6 | 26781 |
| F7MOb2 | TS21.2 | 7 | Mom | EA | NA | Obese | >6 | 4752 |
| F8T1Le1 | TS22 | 8 | Twin | EA | MZ | Lean | >6 | 5110 |
| F8T2Le1 | TS23 | 8 | Twin | EA | MZ | Lean | >6 | 1978 |
| F9T1Le1 | TS25 | 9 | Twin | EA | MZ | Lean | >6 | 10017 |
| F9T1Le2 | TS25.2 | 9 | Twin | EA | MZ | Lean | >6 | 4626 |
| F9T2Le1 | TS26 | 9 | Twin | EA | MZ | Lean | >6 | 16757 |
| F9T2Le2 | TS26.2 | 9 | Twin | EA | MZ | Lean | >6 | 5111 |
| F9MOb1 | TS27 | 9 | Mom | EA | NA | Obese | >6 | 11885 |
| F9MOb2 | TS27.2 | 9 | Mom | EA | NA | Obese | >6 | 2068 |
| F10T1Ob1 | TS28 | 10 | Twin | EA | MZ | Obese | >6 | 6694 |
| F10T2Ob1 | TS29 | 10 | Twin | EA | MZ | Obese | >6 | 2411 |
| F10MOv1 | TS30 | 10 | Mom | EA | NA | Overweight | >6 | 8273 |
| F10MLe2 | TS30.2 | 10 | Mom | EA | NA | Lean | >6 | 3280 |
| F11T1Le1 | TS31 | 11 | Twin | EA | MZ | Lean | >6 | 18941 |
| F11T1Le2 | TS31.2 | 11 | Twin | EA | MZ | Lean | >6 | 5842 |
| F11T2Le1 | TS32 | 11 | Twin | EA | MZ | Lean | >6 | 9773 |
| F11T2Le2 | TS32.2 | 11 | Twin | EA | MZ | Lean | >6 | 6178 |
| F11MOv1 | TS33 | 11 | Mom | EA | NA | Overweight | >6 | 18037 |
| F11MOv2 | TS33.2 | 11 | Mom | EA | NA | Overweight | >6 | 1593 |
| F12T1Ob1 | TS34 | 12 | Twin | EA | MZ | Obese | >6 | 1730 |
| F12T2Ob1 | TS35 | 12 | Twin | EA | MZ | Obese | >6 | 3887 |
| F13T1Ob1 | TS37 | 13 | Twin | EA | MZ | Obese | >6 | 3534 |
| F13T1Ob2 | TS37.2 | 13 | Twin | EA | MZ | Obese | >6 | 4458 |
| F13T2Ov1 | TS38 | 13 | Twin | EA | MZ | Overweight | >6 | 3043 |
| F13T2Ov2 | TS38.2 | 13 | Twin | EA | MZ | Overweight | >6 | 2566 |
| F13MOb1 | TS39 | 13 | Mom | EA | NA | Obese | >6 | 5848 |
| F13MOb2 | TS39.2 | 13 | Mom | EA | NA | Obese | >6 | 2146 |
| F14T1Ob1 | TS43 | 14 | Twin | EA | MZ | Obese | >6 | 2905 |
| F14T2Ob1 | TS44 | 14 | Twin | EA | MZ | Obese | >6 | 1621 |
| F15T1Ob1 | TS49 | 15 | Twin | EA | MZ | Obese | >6 | 11936 |
| F15T1Ob2 | TS49.2 | 15 | Twin | EA | MZ | Obese | >6 | 4220 |
| F15T2Ob1 | TS50 | 15 | Twin | EA | MZ | Obese | >6 | 12672 |
| F15T2Ob2 | TS50.2 | 15 | Twin | EA | MZ | Obese | >6 | 4603 |
| F15MOb1 | TS51 | 15 | Mom | EA | NA | Obese | >6 | 13789 |
| F15MOb2 | TS51.2 | 15 | Mom | EA | NA | Obese | >6 | 3284 |
| F16T1Ob1 | TS55 | 16 | Twin | EA | DZ | Obese | >6 | 3817 |
| F16T1Ob2 | TS55.2 | 16 | Twin | EA | DZ | Obese | >6 | 5210 |
| F16T2Ob1 | TS56 | 16 | Twin | EA | DZ | Obese | >6 | 5147 |
| F16T2Ob2 | TS56.2 | 16 | Twin | EA | DZ | Obese | >6 | 4490 |
| F16MOb1 | TS57 | 16 | Mom | EA | NA | Obese | >0 | 8440 |
| F16MOb2 | TS57.2 | 16 | Mom | EA | NA | Obese | >1 | 2365 |
| F17T1Ob1 | TS61 | 17 | Twin | EA | DZ | Obese | >6 | 672 |
| F17T1Ob2 | TS61.2 | 17 | Twin | EA | DZ | Obese | >6 | 3738 |
| F17T2Ob1 | TS62 | 17 | Twin | EA | DZ | Obese | >6 | 2311 |
| F17T2Ob2 | TS62.2 | 17 | Twin | EA | DZ | Obese | >6 | 3821 |
| F17MOb1 | TS63 | 17 | Mom | EA | NA | Obese | >6 | 2132 |
| F17MOb2 | TS63.2 | 17 | Mom | EA | NA | Obese | >6 | 1853 |
| F18T1Ov1 | TS64 | 18 | Twin | EA | MZ | Overweight | >6 | 4571 |
| F18T1Ov2 | TS64.2 | 18 | Twin | EA | MZ | Overweight | >6 | 4523 |
| F18T2Ob1 | TS65 | 18 | Twin | EA | MZ | Obese | >6 | 2502 |
| F18T2Ob2 | TS65.2 | 18 | Twin | EA | MZ | Obese | >6 | 3943 |
| F18MOb1 | TS66 | 18 | Mom | EA | NA | Obese | >6 | 3491 |
| F18MOb2 | TS66.2 | 18 | Mom | EA | NA | Obese | >6 | 6187 |
| F19T1Ob1 | TS67 | 19 | Twin | EA | DZ | Obese | NA | 988 |
| F19T1Ob2 | TS67.2 | 19 | Twin | EA | DZ | Obese | NA | 1861 |
| F19T2Ob1 | TS68 | 19 | Twin | EA | DZ | Obese | >6 | 3870 |
| F19T2Ob2 | TS68.2 | 19 | Twin | EA | DZ | Obese | >6 | 2242 |
| F19MOb1 | TS69 | 19 | Mom | EA | NA | Obese | >6 | 5290 |
| F19MOb2 | TS69.2 | 19 | Mom | EA | NA | Obese | >0 | 2305 |
| F20T1Obt | TS70 | 20 | Twin | EA | DZ | Obese | >6 | 2139 |
| F20T1Ob2 | TS70.2 | 20 | Twin | EA | DZ | Obese | >6 | 2166 |
| F20T2Ob1 | TS71 | 20 | Twin | EA | DZ | Obese | >6 | 3130 |
| F20T2Ob2 | TS71.2 | 20 | Twin | EA | DZ | Obese | >6 | 2293 |
| F20MOb1 | TS72 | 20 | Mom | EA | NA | Obese | >6 | 1674 |
| F20MOb2 | TS72.2 | 20 | Mom | EA | NA | Obese | >6 | 376 |
| F21T1Ob1 | TS73 | 21 | Twin | EA | DZ | Obese | >6 | 2963 |
| F21T2Ob1 | TS74 | 21 | Twin | EA | DZ | Obese | >6 | 2177 |
| F21T2Ob2 | TS74.2 | 21 | Twin | EA | DZ | Obese | >6 | 1791 |
| F21MOb1 | TS75 | 21 | Mom | EA | NA | Obese | >6 | 1434 |
| F21MOb2 | TS75.2 | 21 | Mom | EA | NA | Obese | >6 | 1887 |
| F22T1Ob1 | TS76 | 22 | Twin | AA | MZ | Obese | >6 | 2977 |
| F22T1Ob2 | TS76.2 | 22 | Twin | AA | MZ | Obese | >6 | 1962 |
| F22T2Ov1 | TS77 | 22 | Twin | AA | MZ | Overweight | >6 | 2168 |
| F22MOb1 | TS78 | 22 | Mom | AA | NA | Obese | >6 | 1460 |
| F22MOb2 | TS78.2 | 22 | Mom | AA | NA | Obese | >6 | 2482 |
| F23T1Ob1 | TS82 | 23 | Twin | AA | MZ | Obese | >6 | 1628 |
| F23T1Ob2 | TS82.2 | 23 | Twin | AA | MZ | Obese | >6 | 1673 |
| F23T2Ob1 | TS83 | 23 | Twin | AA | MZ | Obese | >6 | 1572 |
| F23T2Ob2 | TS83.2 | 23 | Twin | AA | MZ | Obese | >6 | 3349 |
| F23MOb1 | TS84 | 23 | Mom | AA | NA | Obese | >6 | 2215 |
| F23MOb2 | TS84.2 | 23 | Mom | AA | NA | Obese | >6 | 2033 |
| F24T1Ob1 | TS85 | 24 | Twin | EA | DZ | Overweight | >3 | 2385 |
| F24T1Ov2 | TS85.2 | 24 | Twin | EA | DZ | Overweight | >6 | 2122 |
| F24T1Ob1 | TS86 | 24 | Twin | EA | DZ | Obese | >1 | 4107 |
| F24T2Ob2 | TS86.2 | 24 | Twin | EA | DZ | Obese | >3 | 1704 |
| F24MOb1 | TS87 | 24 | Mom | EA | NA | Obese | >6 | 2605 |
| F24MOb1 | TS87.2 | 24 | Mom | EA | NA | Obese | >6 | 1587 |
| F25T1Ob1 | TS88 | 25 | Twin | EA | DZ | Obese | >4 | 2497 |
| F25T1Ob2 | TS88.2 | 25 | Twin | EA | DZ | Obese | >6 | 2129 |
| F25T2Ob1 | TS89 | 25 | Twin | EA | DZ | Obese | >6 | 2108 |
| F25T2Ob2 | TS89.2 | 25 | Twin | EA | DZ | Obese | >6 | 3549 |
| F25MOb1 | TS90 | 25 | Mom | EA | NA | Obese | >6 | 2615 |
| F25MOb2 | TS90.2 | 25 | Mom | EA | NA | Obese | >6 | 2725 |
| F26TtOb1 | TS91 | 26 | Twin | AA | MZ | Obese | >5 | 675 |
| F26TtOb2 | TS91.2 | 26 | Twin | AA | MZ | Obese | >6 | 2307 |
| F26T2Ob1 | TS92 | 26 | Twin | AA | MZ | Obese | >6 | 2036 |
| F26T2Ob2 | TS92.2 | 26 | Twin | AA | MZ | Obese | >6 | 2335 |
| F27T1Ob1 | TS94 | 27 | Twin | AA | MZ | Obese | >6 | 1861 |
| F27T1Ob2 | TS94.2 | 27 | Twin | AA | MZ | Obese | >6 | 2511 |
| F27T2Ob1 | TS95 | 27 | Twin | AA | MZ | Obese | >6 | 2842 |
| F27T2Ob2 | TS95.2 | 27 | Twin | AA | MZ | Obese | >6 | 2550 |
| F27MOb1 | TS96 | 27 | Mom | AA | NA | Obese | >6 | 1516 |
| F27MOb2 | TS96.2 | 27 | Mom | AA | NA | Obese | >6 | 2909 |
| F28T1Ob1 | TS97 | 28 | Twin | AA | DZ | Obese | >6 | 2326 |
| F28T1Ob2 | TS97.2 | 28 | Twin | AA | DZ | Obese | >6 | 2944 |
| F28T2Ob1 | TS98 | 28 | Twin | AA | DZ | Obese | >6 | 2970 |
| F28T2Ob2 | TS98.2 | 28 | Twin | AA | DZ | Obese | >6 | 2851 |
| F28MOv2 | TS99.2 | 28 | Mom | AA | NA | Overweight | >6 | 3136 |
| F29T1Ob1 | TS100 | 29 | Twin | AA | MZ | Obese | >6 | 3504 |
| F29T1Ob2 | TS100.2 | 29 | Twin | AA | MZ | Obese | >6 | 2616 |
| F29T2Ob2 | TS101.2 | 29 | Twin | AA | MZ | Obese | >6 | 2387 |
| F30T1Ob1 | TS103 | 30 | Twin | AA | MZ | Obese | >6 | 1473 |
| F30T1Ob2 | TS103.2 | 30 | Twin | AA | MZ | Obese | >6 | 3012 |
| F30T2Ob1 | TS104 | 30 | Twin | AA | MZ | Obese | >6 | 1970 |
| F30T2Ob2 | TS104.2 | 30 | Twin | AA | MZ | Obese | >6 | 2895 |
| F30MOb1 | TS105 | 30 | Mom | AA | NA | Obese | >6 | 1864 |
| F30MOb2 | TS105.2 | 30 | Mom | AA | NA | Obese | >6 | 2096 |
| F31T1Ob1 | TS106 | 31 | Twin | AA | MZ | Obese | >6 | 2698 |
| F31T1Ob2 | TS106.2 | 31 | Twin | AA | MZ | Obese | >6 | 2250 |
| F31T2Ob1 | TS107 | 31 | Twin | AA | MZ | Obese | >6 | 3132 |
| F31T2Ob2 | TS107.2 | 31 | Twin | AA | MZ | Obese | >6 | 4521 |
| F32T1Le1 | TS109 | 32 | Twin | EA | DZ | Lean | >6 | 2583 |
| F32T1Le2 | TS109.2 | 32 | Twin | EA | DZ | Lean | >6 | 1682 |
| F32T2Le1 | TS110 | 32 | Twin | EA | DZ | Lean | >6 | 2286 |
| F32T2Le2 | TS110.2 | 32 | Twin | EA | DZ | Lean | >6 | 4408 |
| F32MLe1 | TS111 | 32 | Mom | EA | NA | Lean | >6 | 3822 |
| F32MLe2 | TS111.2 | 32 | Mom | EA | NA | Lean | >6 | 2597 |
| F33T1Ob1 | TS115 | 33 | Twin | AA | MZ | Obese | >6 | 2619 |
| F33T1Ob2 | TS115.2 | 33 | Twin | AA | MZ | Obese | >6 | 2017 |
| F33T2Ob1 | TS116 | 33 | Twin | AA | MZ | Obese | >6 | 5558 |
| F33T2Ob2 | TS116.2 | 33 | Twin | AA | MZ | Obese | >6 | 2440 |
| F33MOb1 | TS117 | 33 | Mom | AA | NA | Obese | >6 | 3430 |
| F33MOb2 | TS117.2 | 33 | Mom | AA | NA | Obese | >6 | 2932 |
| F34T1Ob1 | TS118 | 34 | Twin | AA | DZ | Obese | >0 | 2209 |
| F34T1Ob2 | TS118.2 | 34 | Twin | AA | DZ | Obese | >6 | 3030 |
| F34T2Ob1 | TS119 | 34 | Twin | AA | DZ | Obese | >6 | 2791 |
| F34T2Ob2 | TS119.2 | 34 | Twin | AA | DZ | Obese | >0 | 3828 |
| F34MOb1 | TS120 | 34 | Mom | AA | NA | Obese | >6 | 97 |
| F34MOb2 | TS120.2 | 34 | Mom | AA | NA | Obese | >6 | 3015 |
| F35T1Le1 | TS124 | 35 | Twin | EA | DZ | Lean | >6 | 2336 |
| F35T1Le2 | TS124.2 | 35 | Twin | EA | DZ | Lean | >6 | 2102 |
| F35T2Ov1 | TS125 | 35 | Twin | EA | DZ | Overweight | >6 | 2381 |
| F35T2Ov2 | TS125.2 | 35 | Twin | EA | DZ | Overweight | >6 | 1889 |
| F35MOb1 | TS126 | 35 | Mom | EA | NA | Obese | >6 | 1733 |
| F35MOb2 | TS126.2 | 35 | Mom | EA | NA | Obese | >6 | 2676 |
| F36T1Le1 | TS127 | 36 | Twin | EA | DZ | Lean | >6 | 4119 |
| F36T1Le2 | TS127.2 | 36 | Twin | EA | DZ | Lean | >6 | 1929 |
| F36T2Le1 | TS128 | 36 | Twin | EA | DZ | Lean | >6 | 4698 |
| F36T2Le2 | TS128.2 | 36 | Twin | EA | DZ | Lean | >6 | 2857 |
| F36MLe1 | TS129 | 36 | Mom | EA | NA | Lean | >6 | 2628 |
| F36MLe2 | TS129.2 | 36 | Mom | EA | NA | Lean | >6 | 2247 |
| F37T1Ob1 | TS130 | 37 | Twin | AA | MZ | Obese | >6 | 3121 |
| F37T1Ob2 | TS130.2 | 37 | Twin | AA | MZ | Obese | >1 | 3391 |
| F37T2Ob1 | TS131 | 37 | Twin | AA | MZ | Obese | >6 | 3338 |
| F37T2Ob2 | TS131.2 | 37 | Twin | AA | MZ | Obese | NA | 3168 |
| F37MOb1 | TS132 | 37 | Mom | AA | NA | Obese | >1 | 2586 |
| F37MOb2 | TS132.2 | 37 | Mom | AA | NA | Obese | NA | 4130 |
| F38T1Ob1 | TS133 | 38 | Twin | AA | MZ | Obese | >6 | 2355 |
| F38T1Ob2 | TS133.2 | 38 | Twin | AA | MZ | Obese | >6 | 3902 |
| F38T2Ob1 | TS134 | 38 | Twin | AA | MZ | Obese | >3 | 1378 |
| F38T2Ob2 | TS134.2 | 38 | Twin | AA | MZ | Obese | >5 | 2656 |
| F38MOb1 | TS135 | 38 | Mom | AA | NA | Obese | >6 | 3068 |
| F38MOb2 | TS135.2 | 38 | Mom | AA | NA | Obese | >6 | 2436 |
| F39T1Ov1 | TS136 | 39 | Twin | AA | DZ | Overweight | >6 | 2962 |
| F39T1Ob2 | TS136.2 | 39 | Twin | AA | DZ | Obese | >6 | 4164 |
| F39T2Ob1 | TS137 | 39 | Twin | AA | DZ | Obese | >6 | 3748 |
| F39T2Ob2 | TS137.2 | 39 | Twin | AA | DZ | Obese | >0 | 2902 |
| F39MOb1 | TS138 | 39 | Mom | AA | NA | Obese | >6 | 3289 |
| F39MOb2 | TS138.2 | 39 | Mom | AA | NA | Obese | >6 | 1369 |
| F40T1Ob1 | TS139 | 40 | Twin | AA | DZ | Obese | >6 | 2756 |
| F40T1Ob2 | TS139.2 | 40 | Twin | AA | DZ | Obese | >6 | 3195 |
| F40T2Ob1 | TS140 | 40 | Twin | AA | DZ | Obese | >6 | 2698 |
| F40T2Ob2 | TS140.2 | 40 | Twin | AA | DZ | Obese | >6 | 2851 |
| F40MOb1 | TS141 | 40 | Mom | AA | NA | Obese | >6 | 2083 |
| F40MOb2 | TS141.2 | 40 | Mom | AA | NA | Obese | >6 | 3125 |
| F41T1Ob1 | TS142 | 41 | Twin | AA | DZ | Obese | >6 | 2432 |
| F41T1Ob2 | TS142.2 | 41 | Twin | AA | DZ | Obese | >0 | 3466 |
| F41T2Ob1 | TS143 | 41 | Twin | AA | DZ | Obese | >6 | 3944 |
| F41T2Ob2 | TS143.2 | 41 | Twin | AA | DZ | Obese | >6 | 3721 |
| F41MOb1 | TS144 | 41 | Mom | AA | NA | Obese | >6 | 2804 |
| F41MOb2 | TS144.2 | 41 | Mom | AA | NA | Obese | >6 | 4354 |
| F42T1Ob1 | TS145 | 42 | Twin | AA | DZ | Obese | >0 | 2738 |
| F42T1Ob2 | TS145.2 | 42 | Twin | AA | DZ | Obese | >1 | 3633 |
| F42T2Ob1 | TS146 | 42 | Twin | AA | DZ | Obese | >0 | 3214 |
| F42T2Ob2 | TS146.2 | 42 | Twin | AA | DZ | Obese | >1 | 3380 |
| F42Mob1 | TS147 | 42 | Mom | AA | NA | Obese | >2 | 3513 |
| F42Mov2 | TS147.2 | 42 | Mom | AA | NA | Overweight | >4 | 4957 |
| F43T1Ob1 | TS148 | 43 | Twin | EA | MZ | Obese | >6 | 6128 |
| F43T2Ob1 | TS149 | 43 | Twin | EA | MZ | Obese | >5 | 11555 |
| F43MOb1 | TS150 | 43 | Mom | EA | NA | Obese | >6 | 8045 |
| F44T1Ob1 | TS151 | 44 | Twin | AA | DZ | Obese | >6 | 3800 |
| F44T1Ob2 | TS151.2 | 44 | Twin | AA | DZ | Obese | >6 | 3210 |
| F44T2Ob1 | TS152 | 44 | Twin | AA | DZ | Obese | >6 | 3326 |
| F44T2Ob2 | TS152.2 | 44 | Twin | AA | DZ | Obese | >6 | 2742 |
| F44Mov1 | TS153 | 44 | Mom | AA | NA | Overweight | >6 | 4118 |
| F45T1Le2 | TS154.2 | 45 | Twin | AA | MZ | Lean | >6 | 1466 |
| F45T2Le1 | TS155 | 45 | Twin | AA | MZ | Lean | >6 | 2267 |
| F45T2Le2 | TS155.2 | 45 | Twin | AA | MZ | Lean | >6 | 2361 |
| F45MOb1 | TS156 | 45 | Mom | AA | NA | Obese | >2 | 1694 |
| F45MOb2 | TS156.2 | 45 | Mom | AA | NA | Obese | >6 | 1906 |
| F46T1Ob1 | TS160 | 46 | Twin | AA | DZ | Obese | >6 | 2367 |
| F46T1Ob2 | TS160.2 | 46 | Twin | AA | DZ | Obese | >6 | 2049 |
| F46T2Ob1 | TS161 | 46 | Twin | AA | DZ | Obese | >6 | 2185 |
| F46MOb1 | TS162 | 46 | Mom | AA | NA | Obese | >6 | 3564 |
| F46MOb2 | TS162.2 | 46 | Mom | AA | NA | Obese | >6 | 4041 |
| F47T1Le1 | TS163 | 47 | Twin | AA | MZ | Lean | >2 | 1624 |
| F47T1Le2 | TS163.2 | 47 | Twin | AA | MZ | Lean | >3 | 2495 |
| F47T2Le1 | TS164 | 47 | Twin | AA | MZ | Lean | >6 | 2651 |
| F47T2Le2 | TS164.2 | 47 | Twin | AA | MZ | Lean | >6 | 3018 |
| F47MLe1 | TS165 | 47 | Mom | AA | NA | Lean | >6 | 2767 |
| F47MLe2 | TS165.2 | 47 | Mom | AA | NA | Lean | >6 | 2839 |
| F48T1Ob1 | TS166 | 48 | Twin | AA | DZ | Obese | >2 | 3628 |
| F48T1Ob2 | TS166.2 | 48 | Twin | AA | DZ | Obese | >6 | 3252 |
| F48T2Ob1 | TS167 | 48 | Twin | AA | DZ | Obese | >6 | 2822 |
| F48T2Ob2 | TS167.2 | 48 | Twin | AA | DZ | Obese | >6 | 4538 |
| F48MOb1 | TS168 | 48 | Mom | AA | NA | Obese | >6 | 2882 |
| F48MOb2 | TS168.2 | 48 | Mom | AA | NA | Obese | >6 | 4569 |
| F49T1Ob1 | TS169 | 49 | Twin | AA | DZ | Obese | >6 | 4217 |
| F49T1Ob2 | TS169.2 | 49 | Twin | AA | DZ | Obese | >6 | 3644 |
| F49T2Ob1 | TS170 | 49 | Twin | AA | DZ | Obese | >3 | 2117 |
| F49T2Ob2 | TS170.2 | 49 | Twin | AA | DZ | Obese | >6 | 2785 |
| F50T1Ob1 | TS178 | 50 | Twin | AA | DZ | Obese | >6 | 2378 |
| F50T1Ob2 | TS178.2 | 50 | Twin | AA | DZ | Obese | >6 | 2894 |
| F50T2Ob1 | TS179 | 50 | Twin | AA | DZ | Obese | >6 | 2122 |
| F50T2Ob2 | TS179.2 | 50 | Twin | AA | DZ | Obese | >6 | 3189 |
| F50MLe1 | TS180 | 50 | Mom | AA | NA | Lean | >6 | 2132 |
| F51T1Ob1 | TS181 | 51 | Twin | AA | DZ | Obese | >3 | 3455 |
| F51T1Ob2 | TS181.2 | 51 | Twin | AA | DZ | Obese | >6 | 2812 |
| F51T2Ov1 | TS182 | 51 | Twin | AA | DZ | Overweight | >6 | 7014 |
| F51T2Ob2 | TS182.2 | 51 | Twin | AA | DZ | Obese | >6 | 6903 |
| F51MOb1 | TS183 | 51 | Mom | AA | NA | Obese | >2 | 3243 |
| F51MOb2 | TS183.2 | 51 | Mom | AA | NA | Obese | >6 | 2884 |
| F52T1Le1 | TS184 | 52 | Twin | AA | MZ | Lean | >6 | 1925 |
| F52T2Le1 | TS185 | 52 | Twin | AA | MZ | Lean | >6 | 2545 |
| F52T2Le2 | TS185.2 | 52 | Twin | AA | MZ | Lean | >2 | 2538 |
| F52MOv1 | TS186 | 52 | Mom | AA | NA | Overweight | >6 | 1735 |
| F53T1Ob1 | TS190 | 53 | Twin | AA | MZ | Obese | NA | 3165 |
| F53T2Ob1 | TS191 | 53 | Twin | AA | MZ | Obese | >6 | 2720 |
| F53MOv1 | TS192 | 53 | Mom | AA | NA | Overweight | >6 | 5067 |
| F54T1Le1 | TS193 | 54 | Twin | EA | DZ | Lean | >6 | 1799 |
| F54T1Le2 | TS193.2 | 54 | Twin | EA | DZ | Lean | >6 | 1739 |
| F54T2Le1 | TS194 | 54 | Twin | EA | DZ | Lean | >6 | 2291 |
| F54T2Le2 | TS194.2 | 54 | Twin | EA | DZ | Lean | >6 | 1612 |
| F54MLe1 | TS195 | 54 | Mom | EA | NA | Lean | >6 | 2782 |
| F54MLe2 | TS195.2 | 54 | Mom | EA | NA | Lean | >6 | 2462 |
| | | | | | | TOTAL | | 119519 |

TABLE 2
V6 16S rRNA gene sequencing statistics

| Subject ID^{a} | Data ID | Twin/Mom | Family | BMI | Sequences |
|---|---|---|---|---|---|
| F1T1Le1 | TS1 | Twin | 1 | Lean | 25,140 |
| F1T2Le1 | TS2 | Twin | 1 | Lean | 42,186 |
| F1MOv1 | TS3 | Mom | 1 | Overweight | 17,726 |
| F2T1Le1 | TS4 | Twin | 2 | Lean | 25,705 |
| F2T2Le1 | TS5 | Twin | 2 | Lean | 26,608 |
| F2MOb1 | TS6 | Mom | 2 | Obese | 27,007 |
| F3T1Le1 | TS7 | Twin | 3 | Lean | 17,469 |
| F3T2Le1 | TS8 | Twin | 3 | Lean | 17,170 |
| F3MOv1 | TS9 | Mom | 3 | Overweight | 14,787 |
| F5T1Le1 | TS13 | Twin | 5 | Lean | 15,296 |
| F5T2Le1 | TS14 | Twin | 5 | Lean | 14,220 |
| F5MOv1 | TS15 | Mom | 5 | Overweight | 14,244 |
| F7T1Ob1 | TS19 | Twin | 7 | Obese | 43,635 |
| F7T2Ob1 | TS20 | Twin | 7 | Obese | 13,476 |
| F7MOb1 | TS21 | Mom | 7 | Obese | 23,714 |
| F9T1Le1 | TS25 | Twin | 9 | Lean | 20,491 |
| F9T2Le1 | TS26 | Twin | 9 | Lean | 27,626 |
| F9MOb1 | TS27 | Mom | 9 | Obese | 25,494 |
| F10T1Ob1 | TS28 | Twin | 10 | Obese | 20,905 |
| F10T2Ob1 | TS29 | Twin | 10 | Obese | 15,698 |
| F10MOv1 | TS30 | Mom | 10 | Overweight | 32,083 |
| F11T1Le1 | TS31 | Twin | 11 | Lean | 16,530 |
| F11T2Le1 | TS32 | Twin | 11 | Lean | 31,690 |
| F11MOv1 | TS33 | Mom | 11 | Overweight | 28,962 |
| F15T1Ob1 | TS49 | Twin | 15 | Obese | 22,201 |
| F15T2Ob1 | TS50 | Twin | 15 | Obese | 30,498 |
| F15MOb1 | TS51 | Mom | 15 | Obese | 22,691 |
| F16T1Ob1 | TS55 | Twin | 16 | Obese | 37,027 |
| F16T2Ob1 | TS56 | Twin | 16 | Obese | 31,512 |
| F16MOb1 | TS57 | Mom | 16 | Obese | 30,392 |
| F43T1Ob1 | TS148 | Twin | 43 | Obese | 26,458 |
| F43T2Ob1 | TS149 | Twin | 43 | Obese | 35,838 |
| F43MOb1 | TS150 | Mom | 43 | Obese | 23,463 |
| | | | | TOTAL | 817,942 |

^{a}ID nomenclature: Family number, Twin number or mother, and BMI category (Le = lean; Ov = overweight, Ob = obese; e.g. F1T1Le stands for family 1, twin 1, lean)

TABLE 3
Full-length 16S rRNA gene sequencing statistics

| Subject ID^{a} | Data ID | Twin/Mom | Family | BMI | Sequences |
|---|---|---|---|---|---|
| F1T1Le1 | TS1 | Twin | 1 | Lean | 349 |
| F1T2Le1 | TS2 | Twin | 1 | Lean | 351 |
| F1MOv1 | TS3 | Mom | 1 | Overweight | 331 |
| F2T1Le1 | TS4 | Twin | 2 | Lean | 351 |
| F2T2Le1 | TS5 | Twin | 2 | Lean | 345 |
| F2MOb1 | TS6 | Mom | 2 | Obese | 348 |
| F3T1Le1 | TS7 | Twin | 3 | Lean | 237 |
| F3T2Le1 | TS8 | Twin | 3 | Lean | 354 |
| F3MOv1 | TS9 | Mom | 3 | Overweight | 357 |
| F5T1Le1 | TS13 | Twin | 5 | Lean | 337 |
| F5T2Le1 | TS14 | Twin | 5 | Lean | 350 |
| F5MOv1 | TS15 | Mom | 5 | Overweight | 338 |
| F7T1Ob1 | TS19 | Twin | 7 | Obese | 333 |
| F7T2Ob1 | TS20 | Twin | 7 | Obese | 340 |
| F7MOb1 | TS21 | Mom | 7 | Obese | 332 |
| F9T1Le1 | TS25 | Twin | 9 | Lean | 351 |
| F9T2Le1 | TS26 | Twin | 9 | Lean | 252 |
| F9MOb1 | TS27 | Mom | 9 | Obese | 343 |
| F10T1Ob1 | TS28 | Twin | 10 | Obese | 344 |
| F10T2Ob1 | TS29 | Twin | 10 | Obese | 337 |
| F10MOv1 | TS30 | Mom | 10 | Overweight | 261 |
| F15T1Ob1 | TS49 | Twin | 15 | Obese | 338 |
| F15T2Ob1 | TS50 | Twin | 15 | Obese | 319 |
| F15MOb1 | TS51 | Mom | 15 | Obese | 331 |
| F16T1Ob1 | TS55 | Twin | 16 | Obese | 353 |
| F16T2Ob1 | TS56 | Twin | 16 | Obese | 278 |
| F16MOb1 | TS57 | Mom | 16 | Obese | 348 |
| F43T1Ob1 | TS148 | Twin | 43 | Obese | 323 |
| F43T2Ob1 | TS149 | Twin | 43 | Obese | 340 |
| F43MOb1 | TS150 | Mom | 43 | Obese | 349 |
| | | | | TOTAL | 9,920 |

^{a}ID nomenclature: Family number, Twin number or mother, and BMI category (Le = lean; Ov = overweight, Ob = obese; e.g. F1T1LE stands for family 1, twin 1, lean)

TABLE 4
Phytotypes shared across ≧70% of all individuals (V2/3 dataset: 1,000 random sequences/individual)^{a}

| | | | Number | Highest | Lowest | Mean ± sem % | |
|---|---|---|---|---|---|---|---|
| | | % of | of reads | relative | relative | of 16S rRNA | |
| | Individuals | individuals | grouped | abundance | abundance | gene sequences | |
| Phylotype | with | with | into | across all | across all | across all | Taxonomic |
| ID | phylotype | phylotype | phylotype | individuals | individuals | individuals | classification^{b} |
| 1 | 151 | 98.1 | 7942 | 28.7 | 0 | 6.53 ± 0.41 | Bacteria; Fimircutes; |
| | | | | | | | Clostridia; |
| | | | | | | | Faecalibacterium |
| 2 | 151 | 98.1 | 5375 | 25.5 | 0 | 4.41 ± 0.34 | Bacteria; Firmicutes; |
| | | | | | | | Clostridia; |
| | | | | | | | Clostridiales; |
| | | | | | | | Ruminococcus |
| 3 | 144 | 93.5 | 2518 | 14.7 | 0 | 2.06 ± 0.16 | Bacteria; Firmicutes; |
| | | | | | | | Clostridia; |
| | | | | | | | Clostridiales |
| 4 | 143 | 92.9 | 5606 | 30.5 | 0 | 4.56 ± 0.41 | Bacteria; Firmicutes; |
| | | | | | | | Clostridia; |
| | | | | | | | Clostridiales; |
| | | | | | | | Eubacterium rectale |
| 5 | 140 | 90.9 | 1629 | 8.1 | 0 | 1.34 ± 0.11 | Bacteria; Firmicutes; |
| | | | | | | | Clostridia; |
| | | | | | | | Clostridiales; |
| | | | | | | | Clostridium |
| | | | | | | | Clostridioforme |
| 6 | 134 | 87.0 | 757 | 12.7 | 0 | 0.62 ± 0.09 | Bacteria; Firmicutes; |
| | | | | | | | Clostridia; |
| | | | | | | | Clostridiales; |
| | | | | | | | Ruminococcus; |
| | | | | | | | Ruminococcus |
| | | | | | | | schinkii |
| 7 | 133 | 86.4 | 1485 | 12.2 | 0 | 1.23 ± 0.14 | Bacteria; Firmicutes; |
| | | | | | | | Clostridia; |
| | | | | | | | Clostridiales; |
| | | | | | | | Coprococcus |
| 8 | 133 | 86.4 | 1392 | 6.5 | 0 | 1.14 ± 0.10 | Bacteria; Firmicutes; |
| | | | | | | | Clostridia; |
| | | | | | | | Clostridiales |
| 9 | 133 | 86.4 | 1201 | 10.5 | 0 | 0.99 ± 0.12 | Bacteria; Firmicutes; |
| | | | | | | | Clostridia; |
| | | | | | | | Clostridiales; |
| | | | | | | | Ruminococcus |
| 10 | 128 | 83.1 | 819 | 5.2 | 0 | 0.68 ± 0.06 | Bacteria; Firmicutes; |
| | | | | | | | Clostridia; |
| | | | | | | | Clostridiales |
| 11 | 127 | 82.5 | 747 | 3.7 | 0 | 0.62 ± 0.05 | Bacteria; Fimircutes; |
| | | | | | | | Clostridia; |
| | | | | | | | Faecalibacterium |
| 12 | 126 | 81.8 | 11598 | 51.6 | 0 | 9.39 ± 0.79 | Bacteria; |
| | | | | | | | Bacteroidetes; |
| | | | | | | | Bacteroidales; |
| | | | | | | | Bacteroidaceae |
| 13 | 125 | 81.2 | 2585 | 34.3 | 0 | 2.15 ± 0.31 | Bacteria; Fimircutes; |
| | | | | | | | Clostridia; |
| | | | | | | | Faecalibacterium |
| 14 | 123 | 79.9 | 3512 | 15.3 | 0 | 2.89 ± 0.25 | Bacteria; Fimircutes; |
| | | | | | | | Clostridia; |
| | | | | | | | Faecalibacterium |
| 15 | 120 | 77.9 | 792 | 8.4 | 0 | 0.66 ± 0.08 | Bacteria; Firmicutes; |
| | | | | | | | Clostridia; |
| | | | | | | | Clostridiales; |
| | | | | | | | Clostridium nexile |
| 16 | 118 | 76.6 | 632 | 2.7 | 0 | 0.52 ± 0.05 | Bacteria; Fimircutes; |
| | | | | | | | Clostridia; |
| | | | | | | | Faecalibacterium |
| 17 | 115 | 74.7 | 3422 | 43.3 | 0 | 2.79 ± 0.41 | Bacteria; |
| | | | | | | | Bacteroidetes; |
| | | | | | | | Bacteroidales; |
| | | | | | | | Bacteroidaceae |
| 18 | 113 | 73.4 | 441 | 2.3 | 0 | 0.37 ± 0.03 | Bacteria; Firmicutes; |
| | | | | | | | Clostridia; |
| | | | | | | | Clostridiales; |
| | | | | | | | Clostridium nexile |
| 19 | 112 | 72.7 | 1168 | 17.4 | 0 | 0.98 ± 0.16 | Bacteria; Firmicutes; |
| | | | | | | | Clostridia; |
| | | | | | | | Clostridiales; |
| | | | | | | | Ruminococcus |
| 20 | 111 | 72.1 | 749 | 5.2 | 0 | 0.61 ± 0.07 | Bacteria; Firmicutes; |
| | | | | | | | Clostridia; |
| | | | | | | | Clostridiales |
| 21 | 108 | 70.1 | 640 | 3.5 | 0 | 0.53 ± 0.06 | Bacteria; Firmicutes; |
| | | | | | | | Clostridia; |
| | | | | | | | Clostridiales; |
| | | | | | | | Ruminococcus |

^{a}1,000 sequences were randomly sampled from a single timepoint for each individual
^{b}Based on the consensus taxonomy of ≧90% sequences within each phylotype (best-BLAST-hit against the Greengenes database)

TABLE 5
Phylotypes shared across >90% of all individuals (V6 dataset: 10,000 random sequences/individual)

| | | | Number | Highest | Lowest | Mean ± sem % | |
|---|---|---|---|---|---|---|---|
| | | % of | of reads | relative | relative | of 16S rRNA | |
| | Individuals | individuals | grouped | abundance | abundance | gene sequences | |
| Phylotype | with | with | into | across all | across all | across all | Taxonomic |
| ID | phylotype | phylotype | phylotype | individuals | individuals | individuals | classification^{a} |
| 1 | 33 | 100.0 | 10400 | 9.7 | 0.011 | 3.40 ± 0.45 | Bacteria; Firmicutes; |
| | | | | | | | Clostridia; |
| | | | | | | | Clostridiales; |
| | | | | | | | Clostridium nexile |
| 2 | 33 | 100.0 | 5161 | 5.9 | 0.011 | 1.67 ± 0.23 | Bacteria; Firmicutes; |
| | | | | | | | Clostridiales; |
| | | | | | | | Clostridium nexile; |
| | | | | | | | Clostridium |
| | | | | | | | fusiformis |
| 3 | 33 | 100.0 | 6077 | 6.7 | 0.021 | 1.97 ± 0.32 | Bacteria; Firmicutes; |
| | | | | | | | Clostridia; |
| | | | | | | | Clostridiales; |
| | | | | | | | Ruminococcus |
| 4 | 33 | 100.0 | 16600 | 26.8 | 0.011 | 5.36 ± 1.02 | Bacteria; Firmicutes; |
| | | | | | | | Clostridia; |
| | | | | | | | Clostridiales; |
| | | | | | | | Eubacterium rectale |
| 5 | 33 | 100.0 | 11654 | 12.5 | 0.011 | 3.78 ± 0.58 | Bacteria; Firmicutes; |
| | | | | | | | Clostridia; |
| | | | | | | | Clostridiales; |
| | | | | | | | Ruminococcus |
| 6 | 32 | 97.0 | 3113 | 5.8 | 0.000 | 1.01 ± 0.23 | Bacteria; Firmicutes; |
| | | | | | | | Clostridia; |
| | | | | | | | Clostridiales; |
| | | | | | | | Clostridium nexile |
| 7 | 32 | 97.0 | 2908 | 4.2 | 0.000 | 0.96 ± 0.21 | Bacteria; |
| | | | | | | | Bacteroidetes; |
| | | | | | | | Bacteroidales; |
| | | | | | | | Bacteroidaceae |
| 8 | 32 | 97.0 | 2382 | 3.7 | 0.000 | 0.78 ± 0.13 | Bacteria; Firmicutes; |
| | | | | | | | Clostridia; |
| | | | | | | | Clostridiales; |
| | | | | | | | Ruminococcus |
| 9 | 32 | 97.0 | 1712 | 4.4 | 0.000 | 0.56 ± 0.14 | Bacteria; Firmicutes; |
| | | | | | | | Clostridia; |
| | | | | | | | Clostridiales; |
| | | | | | | | Ruminococcus; |
| | | | | | | | Ruminococcus |
| | | | | | | | schinkii |
| 10 | 31 | 93.9 | 3940 | 6.6 | 0.000 | 1.29 ± 0.26 | Bacteria; Fimircutes; |
| | | | | | | | Clostridia: |
| | | | | | | | Faecalibacterium |
| 11 | 31 | 93.9 | 3729 | 4.9 | 0.000 | 1.21 ± 0.18 | Bacteria; Firmicutes; |
| | | | | | | | Clostridia; |
| | | | | | | | Clostridiales; |
| | | | | | | | Clostridium nexile |
| 12 | 30 | 90.9 | 454 | 0.7 | 0.000 | 0.15 ± 0.03 | Bacteria; Firmicutes; |
| | | | | | | | Clostridia; |
| | | | | | | | Clostridiales; |
| | | | | | | | Ruminococcus |
| 13 | 30 | 90.9 | 687 | 1.1 | 0.000 | 0.23 ± 0.04 | Bacteria; Firmicutes; |
| | | | | | | | Clostridia |
| 14 | 30 | 90.9 | 999 | 2.3 | 0.000 | 0.33 ± 0.08 | Bacteria; Firmicutes; |
| | | | | | | | Clostridia; |
| | | | | | | | Preptostreptococaceae; |
| | | | | | | | Peptostreptococcus_anaerobius; |
| | | | | | | | Clostridium |
| | | | | | | | bifermentans |
| 15 | 30 | 90.9 | 1241 | 5.3 | 0.000 | 0.40 ± 0.16 | Bacteria; Firmicutes; |
| | | | | | | | Clostridia; |
| | | | | | | | Clostridiales; |
| | | | | | | | Clostridium bolteae |
| 16 | 30 | 90.9 | 160 | 0.2 | 0.000 | 0.05 ± 0.01 | Bacteria; |
| | | | | | | | Actinobacteria; |
| | | | | | | | Actinobacteridae; |
| | | | | | | | Actinomycineae |
| 17 | 30 | 90.9 | 1417 | 2.0 | 0.000 | 0.46 ± 0.09 | Bacteria; Firmicutes; |
| | | | | | | | Clostridia; |
| | | | | | | | Clostridiales; |
| | | | | | | | Ruminococcus |
| 18 | 30 | 90.9 | 1014 | 1.2 | 0.000 | 0.33 ± 0.06 | Bacteria; Firmicutes; |
| | | | | | | | Clostridia; |
| | | | | | | | Clostridiales |
| 19 | 30 | 90.9 | 1353 | 1.6 | 0.000 | 0.44 ± 0.08 | Bacteria; Firmicutes; |
| | | | | | | | Clostridia; |
| | | | | | | | Clostridiales; |
| | | | | | | | Ruminococcus; |
| | | | | | | | Ruminococcus luti |
| 20 | 30 | 90.9 | 2686 | 6.0 | 0.000 | 0.88 ± 0.22 | Bacteria; Firmicutes; |
| | | | | | | | Clostridia; |
| | | | | | | | Clostridiales; |
| | | | | | | | Clostridium |
| | | | | | | | Clostridioforme |
| 21 | 30 | 90.9 | 7454 | 12.2 | 0.000 | 2.43 ± 0.63 | Bacteria; Fimircutes; |
| | | | | | | | Clostridia; |
| | | | | | | | Faecalibacterium |

^{a}Based on the consensus taxonomy of >90% sequences within each phylotype (best-BLAST-hit against the Greengenes database)

TABLE 6
Phylotypes shared across ≧70% of all individiuals (Full-length dataset; 200 random sequences/individua

[symbol]

| | | | | | | Mean ± sem % | |
|---|---|---|---|---|---|---|---|
| | | | Number | Highest | Lowest | of 16S rRNA | |
| | | % of | of reads | relative | relative | gene | |
| | Individuals | individuals | grouped | abundance | abundance | sequences | |
| Phylotype | with | with | into | across all | across all | across all | Taxonomic |
| ID | phylotype | phylotype | phylotype | individuals | individuals | individuals | Classification^{a} |
| 1 | 28 | 93.3 | 378 | 17.9 | 0.0 | 7.81 ± 1.04 | Bacteria; Firmicutes; |
| | | | | | | | Clostridia; Faecalibacteri [symbol] |
| 2 | 27 | 90.0 | 347 | 25.0 | 0.0 | 6.90 ± 1.20 | Bacteria; Firmicutes; |
| | | | | | | | Clostridia; Clostridiales; |
| | | | | | | | Ruminococcus |
| 3 | 26 | 86.7 | 128 | 9.9 | 0.0 | 2.62 ± 0.47 | Bacteria; Firmicutes; |
| | | | | | | | Clostridia; Clostridiales |
| 4 | 26 | 86.7 | 298 | 23.1 | 0.0 | 6.00 ± 1.14 | Bacteria; Firmicutes; |
| | | | | | | | Clostridia; Clostridiales; |
| | | | | | | | Eubacterium rectale |
| 5 | 26 | 86.7 | 127 | 12.0 | 0.0 | 2.64 ± 0.49 | Bacteria; Firmicutes; |
| | | | | | | | Clostridia; Clostridiales; |
| | | | | | | | Clostridium clostridioform |
| 6 | 22 | 73.3 | 110 | 10.9 | 0.0 | 2.33 ± 0.55 | Bacteria; Bacteroidetes; |
| | | | | | | | Bacteroidales; |
| | | | | | | | Bacteroidaceae |
| 7 | 22 | 73.3 | 87 | 5.7 | 0.0 | 1.76 ± 0.29 | Bacteria; Firmicutes; |
| | | | | | | | Clostridia; Clostridiales; |
| | | | | | | | Clostridium nexile; |
| | | | | | | | Clostridium fusiformis |
| 8 | 21 | 70.0 | 112 | 11.9 | 0.0 | 2.32 ± 0.49 | Bacteria; Firmicutes; |
| | | | | | | | Clostridia; Clostridiales; |
| | | | | | | | Coprococcus |
| 9 | 21 | 70.0 | 75 | 6.9 | 0.0 | 1.53 ± 0.32 | Bacteria; Firmicutes; |
| | | | | | | | Clostridia; Clostridiales; |
| | | | | | | | Clostridium nexile |
| 10 | 21 | 70.0 | 54 | 5.7 | 0.0 | 1.14 ± 0.23 | Bacteria; Firmicutes; |
| | | | | | | | Clostridia; Clostridiales; |
| | | | | | | | Clostridium nexile |

^{a}Based on the consensus taxonomy of >90% sequences within each phylotype (best-BLAST-hit against the Greengenes database) [symbol]
indicates data missing or illegible when filed

### Sample Characteristics

[0124] Twin pairs who had been enrolled in the Missouri Adolescent Female Twin Study (MOAFTS) were recruited for this study (mean period of enrollment, 11.7±1.2 years; range, 4.4-13.0 years). The MOAFTS twin cohort, comprised of female like-sex twin pairs, was identified from Missouri birth records over the period 1994-1999, when the twins were median age 15. A total of 350 twins from the larger MOAFTS cohort completed screening interviews for the present study. Pairs most likely to meet study criteria were identified at the wave five interview of the MOAFTS twin cohort (which has 90% retention of wave four participants). Eligibility was then confirmed at screening interview. All twins were 25-32 years old, of European or African ancestry (EA and AA, respectively), were generally concordant for obesity (BMI>30 kg/m²) or leanness (BMI=18.5-24.9 kg/m²) [1 twin pair was lean/overweight (overweight defined as BMI≧25 and <30) and 6 pairs were overweight/obese], and had not taken antibiotics for at least 5.49±0.09 months. Each participant completed a detailed medical, lifestyle, and dietary questionnaire. Participants were broadly representative of the overall Missouri population with respect to BMI, parity, education, and marital status. Although all were born in Missouri, they currently live throughout the USA: 29% live in the same house, but some live >800 km apart. Since fecal samples are readily attainable and representative of interpersonal differences in gut microbial ecology, they were collected from each individual and frozen immediately. The collection procedure was repeated again with an average interval between sample collections of 57±4 days.

### Community DNA Preparation

[0125] Frozen de-identified fecal samples were stored at −80° C. before processing. In order to homogenize each sample, a 10-20 g aliquot of each sample was pulverized in liquid nitrogen with a mortar and pestle. An aliquot (˜500 mg) of each sample was then suspended, while frozen, in a solution containing 500 μl of extraction buffer [200 mM Tris (pH 8.0), 200 mM NaCl, 20 mM EDTA], 210 μl of 20% SDS, 500 μl of a mixture of phenol:chloroform:isoamyl alcohol (25:24:1, pH 7.9), and 500 μl of a slurry of 0.1 mm-diameter zirconia/silica beads (BioSpec Products, Bartlesville, Okla.). Microbial cells were subsequently lysed by mechanical disruption with a bead beater (BioSpec Products) set on high for 2 min at room temperature, followed by extraction with phenol:chloroform:isoamyl alcohol, and precipitation with isopropanol. DNA obtained from three separate 10 mg frozen aliquots of each fecal sample were pooled (≧200 μg DNA) and used for pyrosequencing (see below).

Full-Length 16S rRNA Sequence-Based Surveys

[0126] Five replicate PCR reactions were performed for each fecal DNA sample. To generate full length or near full length bacterial 16S rRNA amplicons, each 25 μl reaction contained 100 ng of gel purified DNA (Qiaquick, Qiagen), 10 mM Tris (pH 8.3), 50 mM KCl, 2 mM MgSO4, 0.16 μM dNTPs, 0.4 μM of the bacteria-specific primer 8F (5′-AGAGTTTGATCCTGGCTCAG-3′), 0.4 μM of the universal primer 1391R (5′-GACGGGCGGTGWGTRCA-3′), 0.4 M betaine, and 3 units of Taq polymerase (Invitrogen). Cycling conditions were 94° C. for 2 min, followed by 25 cycles of 94° C. for 1 min, 55° C. for 45 sec, and 72° C. for 2 min. Replicate PCRs were pooled and concentrated (Millipore; Montage PCR filter columns). Full-length 16S rRNA gene amplicons (1.3 kb) were then gel-purified using the Qiaquick kit (Qiagen), subcloned into TOPO TA pCR4.0 (Invitrogen), and the ligated DNA transformed into E. coli TOP10 (Invitrogen). For each sample, 384 colonies containing cloned 16S rRNA nucleic acid amplicons were processed for sequencing. Plasmid inserts were sequenced bi-directionally using vector-specific primers plus the internal primer 907R (5′-CCGTCAATTCCTTTRAGTTT-3′).

[0127] 16S rRNA gene sequences were edited and assembled into consensus sequences using the PHRED and PHRAP software packages within the Xplorseq program. Sequences that did not assemble were discarded and bases with PHRED quality scores <20 were trimmed. Sequences were checked for chimeras using Bellerophon program version 3 with the default parameters (final dataset n=8,941 near full-length 16S rRNA gene sequences; for sequence designations see Table 1). Alignments for reference genome 16S rRNA gene sequences were manually edited in ARB.

V2/3 16S rRNA Sequence-Based Surveys

[0128] Four replicate PCR reactions targeting the V2/3 region of bacterial 16S rRNA genes were performed on the same fecal DNA samples used above. Each 20 μl reaction contained 100 ng of gel purified DNA (Qiaquick, Qiagen), 8 μl 2.5× HotMaster PCR Mix (Eppendorf), 0.3 μM of the primer 8F [5′-GCCTTGCCAGCCCGCTCAG-TCAGAGTTTGATCCTGGCTCAG-3′; composite of 454 primer B (underlined), linker nucleotides (TC), and the universal bacterial primer 8F (italics)], and 0.3 μM of the primer 338R [5′-GCCTCCCTCGCGCCATCAGNNNNNNNNCA-TGCTGCCTCCCGTAGGAGT-3′; 454 Life Sciences primer A (underlined), a unique 8 base barcode (Ns), linker nucleotides (CA), and the broad-range bacterial primer 338R (italics)]. Cycling conditions were 95° C. for 2 min, followed by 30 cycles of 95° C. for 20 sec, 52° C. for 20 sec, and 65° C. for 1 min. Replicate PCRs were pooled and purified with Ampure magnetic purification beads (Agencourt).

[0129] PCR products were quantified with the bisbenzimide H assay. An aliquot of each PCR product was incubated for 5 min at room temperature in THE reagent [10 mM Trizma HCl pH 8.1, 100 mM NaCl, 1 mM EDTA, and 50 ng/ml freshly prepared bisbenzimide H (Sigma)]. Samples were read on a fluorometer or plate reader (excitation at 365 nm, emission at 460 nm) relative to a standard curve constructed using E. coli DNA (Sigma). Multiple pools, each containing approximately equimolar amounts of PCR products, were assembled for 454 FLX amplicon pyrosequencing (n=33-100 barcoded samples/pool). Technical replicates were analyzed from selected representatives of each pool across four different sequencing centers; results were highly reproducible, discriminating between individuals and between samples from the same individual over time (FIG. 1).

V6 16S rRNA Sequence-Based Surveys

[0130] PCR reactions targeting the V6 region of bacterial 16S rRNA genes were performed on the same fecal DNA samples used above. Each 32 μl reaction contained 100 ng of gel purified DNA (Qiaquick, Qiagen), PCR buffer (PurePeak DNA polymerization mix, Thermo-Fisher), 0.625 mM PurePeak dNTPs (Thermo-Scientific), 0.625 μM Fusion Primer A, 0.625 μM Fusion Primer B, and 5U Pfu polymerase (Stratagene). The primer set included 5 forward primers (Fusion A) and 4 reverse primers (Fusion B) fused to the 454 Life Sciences adaptors A and B respectively. Cycling conditions were 94° C. for 3 min, followed by 30 cycles of 94° C. for 30 sec, 57° C. for 45 sec, and 72° C. for 1 min, with a final extension period of 72° C. for 2 min. PCR products were purified with MinElute columns (Qiagen), and DNA was quantified using a Bioanalyzer (Agilent) and the PicoGreen assay (Invitrogen). Two pools of PCR products were constructed for 454 FLX amplicon pyrosequencing, composed of 18 and 20 samples, respectively (the second run contained 3 samples from the V2/3 region and 3 technical replicates, one additional sample (TS30) was sequenced in a third run, bringing the total number of V6 samples processed to 33). Since technical replicates were highly reproducible (see above and FIG. 5), datasets for a given individual's biospecimen were pooled for all subsequent analyses. Any sequences that did not have an exact match to the proximal primer or that contained one or more ambiguous bases were removed as low quality. The proximal primer and any fuzzy matches (identified with BLAST and the fuzznuc program) to the distal primer were then trimmed from the sequences. Finally, any trimmed sequences shorter than 50 nucleotides were also removed as low quality.

### Picking Operational Taxonomic Units (OTUs)

[0131] Pyrosequencing data was pre-processed to remove sequences with low quality scores, sequences with ambiguous characters, or sequences outside of the length bounds (V6<50 nt, V2/3<200 nt) and binned according to sample based on the error-correcting barcodes. Similar sequences were identified using the Megablast software and the following parameters: E-value 1⁻¹⁰; minimum coverage, 99%; and minimum pairwise identity, 97%. Candidate OTUs were identified as sets of sequences connected to each other at this level using the top 4000 hits per sequence. Each candidate OTU was considered valid if the average density of connection was above threshold; otherwise it was broken up into smaller connected components.

### Tree Building and UniFrac Clustering for PCA Analysis

[0132] A relaxed neighbor-joining tree was built from one representative sequence per OTU using Clearcut, employing the Kimura correction (the PH lanemask was applied to V2/3 data), but otherwise with default comparisons. Unweighted UniFrac was run using the resulting tree and the counts of each sequence in each sample. Priniciple component analysis (PCA) was performed on the resulting matrix of distances between each pair of samples. To determine if the UniFrac distances were on average significantly different for pairs of samples (i.e. between twin-pairs, between twins and their mother, or between unrelated individuals), a t-test was performed on the UniFrac distance matrix, and a p-value was generated for the t-statistic by permutation of the rows and columns as in the Mantel test, regenerating the t-statistic for 1000 random samples, and using the distribution to obtain an empirical p-value.

### Taxonomy Assignment

[0133] Taxonomy was assigned using the best-BLAST-hit against Greengenes (E-value cutoff of 1e⁻¹⁰, minimum 88% coverage, 88% percent identity) and the Hugenholtz taxomony, downloaded May 12, 2008, excluding sequences annotated as chimeric (http://greengenes.lbl.gov/Download/Sequence_Data/Greengenes_format/).

### Rarefaction and Phylogenetic Diversity Measurements

[0134] To determine which individuals had the most diverse communities of gut bacteria, rarefaction plots and Phylogenetic Diversity (PD) measurements, as described by Faith (Biological Conservation 1992), were made for each sample. PD is the total amount of branch length in a phylogenetic tree constructed from the combined 16S rRNA dataset, leading to the sequences in a given sample. To account for differences in sampling effort between individuals, and to estimate the thoroughness of sampling of each individual, the accumulation of PD (branch length) with sampling effort was plotted in a manner analogous to rarefaction curves. The PD rarefaction curve for each individual was generated by applying custom python code that can be downloaded from http://bayes.colorado.edu/unifrac, to the Arb parsimony insertion tree.

### Results

[0135] To characterize the bacterial lineages present in the fecal microbiotas of these 44 individuals, 16S rRNA sequencing was performed, targeting the full-length gene with an ABI 3730xl capillary sequencer. Additionally, multiplex sequencing with a 454 FLX pyrosequencer was used to survey the V2/3 variable region and the V6 hypervariable region (Tables 1, 2 and 3). Complementary phylogenetic and taxon-based methods were used to compare 16S rRNA sequences among fecal communities. Phylogenetic clustering with UniFrac is based on the principle that communities can be compared in terms of their shared evolutionary history, as measured by the degree to which they share branch length on a phylogenetic tree. This approach was complemented with taxon-based methods; these methods disregard some of the information contained in the phylogenetic tree of the taxa in question, but have the advantage that specific taxa unique to, or shared among, groups of samples can be identified (e.g., those from lean or obese individuals). Prior to both types of analyses, 16S rRNA gene sequences were grouped into Operational Taxonomic Units (OTUs/phylotypes) using the furthest-neighbor-like algorithm and a sequence identity threshold of 97%, which is commonly used to define ‘species’-level phylotypes. Taxonomic assignments were made using BLAST and Hugenholtz taxonomy annotations in the Greengenes database.

[0136] No matter which region of the 16S rRNA gene was examined (V2/3 or V6 pyrosequencing reads, or the near-complete gene from Sanger reads), individuals from the same family (a twin and her co-twin, or twins and their mother) had a more similar bacterial community structure than unrelated individuals (FIGS. 2A and 3A, B) and shared significantly more phylotypes [G=55.2, p<10⁻¹² (V2/3); G=112.3, p<0.001 (V6); G=11.3, p<0.001 (full-length)]. No significant correlation was seen between the degree of physical separation of family members' current homes and the degree of similarity between their microbial communities (defined by UniFrac). The observed familial similarity was not due to an indirect effect of the physiologic states of obesity versus leanness; similar results were observed after stratifying twin-pairs and their mothers by BMI category (concordant lean or concordant obese individuals; FIG. 4). Surprisingly, there was no significant difference in the degree of similarity in the gut microbiotas of adult MZ versus DZ twin-pairs (FIG. 2A). However, in the present study it was not assessed whether MZ and DZ twin pairs had different degrees of similarities at earlier stages of their lives.

[0137] Multiplex pyrosequencing of V2/3 and V6 amplicons allowed higher levels of coverage of community diversity compared to what was feasible using Sanger sequencing, reaching on average 3,984±232 (V2/3) and 24,786±1,403 (V6) sequences per sample. To control for differences in coverage between samples, all analyses were performed on an equal number of randomly selected sequences [200 full-length, 1,000 V2/3, and 10,000 V6]. At this level of coverage, there was little overlap between the sampled fecal communities: only 2, 5, and 21 phylotypes were found in >90% of the individuals surveyed (full-length, V2/3, and V6 data respectively). Moreover, the number of 16S rRNA gene sequences belonging to these phylotypes varied greatly between fecal microbiotas (Tables 4, 5 and 6).

[0138] Samples taken from the same individual at the initial collection point and 57±4 days later were remarkably consistent with respect to the specific phylotypes found (FIGS. 1 and 5), but showed variations in the relative abundance of the major gut bacterial phyla (FIG. 6). There was no significant association between UniFrac distance and the time between sample collections. Overall, fecal samples from the same individual were much more similar to one another than samples from family members or unrelated individuals (FIG. 2A), demonstrating that short-term temporal changes in community structure within an individual are minor compared to inter-personal differences.

[0139] After assigning V2/3, V6 and full-length 16S rRNA gene sequences to bacterial taxa (see Example 3 below), it was found that obese individuals generally had a lower relative abundance of the Bacteroidetes and a higher relative abundance of the Firmicutes and Actinobacteria: the statistical significance of these observations varied depending upon the sequencing methods used (Table 7), likely due to differences in PCR conditions (for example, the 8F primer has a known bias against Actinobacteria).

[0140] In summary, across all methods, obesity was associated with a significant decrease in the level of diversity (FIG. 2B and FIGS. 3C-F). This reduced diversity suggests an analogy: the obese gut microbiota is not like a rainforest or reef, which are adapted to high energy flux and are highly diverse, but rather may be more like a fertilizer runoff where a reduced diversity microbial community blooms with abnormal energy input.

TABLE 7
Phylum-level taxonomic assignments^{a}

| | | lean | | | obese | | | |
|---|---|---|---|---|---|---|---|---|
| | | mean | sem | N | mean | sem | N | p-value^{b} |
| V2/3 (EA) | % Bacteroidetes | 26.76 | 2.46 | 26 | 24.39 | 1.89 | 42 | 0.22 |
| | % Firmicutes | 71.48 | 2.50 | 26 | 72.57 | 1.92 | 42 | 0.36 |
| | % Actinobacteria | 0.72 | 0.14 | 26 | 1.70 | 0.58 | 42 | 0.05 |
| V2/3 (AA)^{C} | % Bacteroidetes | 37.52 | 3.05 | 8 | 29.41 | 1.49 | 62 | 0.02 |
| | % Firmicutes | 60.74 | 3.04 | 8 | 68.14 | 1.42 | 62 | 0.03 |
| | % Actinobacteria | 0.97 | 0.40 | 8 | 1.27 | 0.21 | 62 | 0.26 |
| V6 (EA) | % Bacteroidetes | 6.85 | 1.25 | 12 | 3.15 | 0.93 | 16 | 0.01 |
| | % Firmicutes | 81.72 | 2.41 | 12 | 75.99 | 4.60 | 16 | 0.14 |
| | % Actinobacteria | 7.14 | 1.76 | 12 | 17.91 | 5.01 | 16 | 0.03 |
| Full-length (EA) | % Bacteroidetes | 11.44 | 2.77 | 10 | 7.58 | 2.35 | 16 | 0.15 |
| | % Firmicutes | 83.50 | 2.28 | 10 | 84.60 | 3.03 | 16 | 0.39 |
| | % Actinobacteria | 2.78 | 0.78 | 10 | 4.41 | 1.14 | 16 | 0.13 |
| BLAST (EA)^{d} | % Bacteroidetes | 42.60 | 8.75 | 6 | 34.69 | 8.16 | 9 | 0.26 |
| | % Firmicutes | 51.54 | 8.35 | 6 | 51.25 | 5.47 | 9 | 0.49 |
| | % Actinobacteria | 2.07 | 0.33 | 6 | 10.34 | 3.35 | 9 | 0.02 |

^{a}A subset of each dataset was included in the analysis: 10,000 sequences/sample (V6), 1,000 sequences/sample (V2/3) and 200 sequences/sample (full-length). Sequences from the same individual across both timepoints were pooled.
^{b}Values are from a Student's t-test of the obese versus lean distribution
^{c}The AA lean individuals surveyed have significantly more Bacteroidetes and less Firmicutes than the lean EA individuals (p < 0.05)
^{d}BLASTX comparisons between microbiomes and NCBI non-redundant database

### Example 2

### Distribution of Phylotypes in Individuals

[0141] All hosts were searched for bacterial phylotypes present at high abundance using a sampling model based on a combination of standard Poisson and binomial sampling statistics.

### Phylotype Sampling Model

[0142] A sampling model was developed that allows placement of bounds on the maximum abundance of any phylotype found across all samples. The principle here is that if a given phylotype made up not less than some proportion p of the microbiome of all humans, it is then possible to calculate (i) the number of samples of a given size expected to lack that phylotype due to sampling error, and (ii) the probability that an actual proportion p-hat as low as the minimum abundance would be observed in any sample.

[0143] The probability P of failing to observe a given microbe at proportion p in a sample of size n is given by Poisson statistics as simply e^{-pn}. For equal sample sizes, the probability of observing the phylotype in at least k samples using binomial sampling with Pr(success)=(1−P) can therefore be calculated. Then, the inverse binomial can be used to ask what value of P, and therefore of p, gives a specified probability (say, 5%) of observing a given phylotype in as few samples as actually observed for the most abundant phylotype. This calculation yields an upper bound for p (i.e. the value of p at which we can reject the idea that we would have seen the phylotype in as few samples as actually observed at the 95% confidence level).

[0144] For unequal sizes, there is no analytical solution to the equivalent of the binomial in which Pr(success) differs for each trial. Therefore, numerical optimization must be used to solve for p. Because the function relating p and the probability of observing the phylotype in at least a given number of samples is monotonic, a bisection search (bounded by p=0 and p=1) can be used to find the appropriate value of p for a desired confidence level. In practice, P was calculated for each sample, a vector of random numbers between 0 and 1 was chosen, and the number of times the random number at a given position was less than P was counted. Repeating this procedure for a fixed number of iterations (100,000 for the reported values) gives sufficiently smooth values to approximate the monotonic function and to allow the bisection search to converge on the same value of p to three significant figures across repeated trials.

[0145] In the case where a phylotype was found in all samples, a similar procedure could be used to identify the maximum value of p consistent with the observed minimum abundance of the phylotype whose minimum abundance across all samples is highest. In this case, instead of calculating the fraction of samples in which the phylotype was absent, (i) binomial sampling could be used to randomly sample the number of observed counts of a phylotype given the parametric value of p and the sample size of each sample, (ii) the minimum abundance across all samples could be measured, and (iii) this minimum abundance compared to the minimum abundance actually observed. Again, an analytical solution using extreme-value statistics is possible if sample sizes are equal, but the solution must be obtained by numerical methods (in this case, the same type of bisection search used above). The sampling model was implemented in Python using PyCogent.

### Results

[0146] Using this model the full-length 16S rRNA dataset described in Example 1 was first analyzed. The most abundant ‘species’-level phylotype in each sample made up 11% of that sample on average (range: 4.2%-22.0%), and the most abundant phylotype found across the combined dataset was found in 25 of the 27 fecal microbiotas (taxonomy assignment=Bacteria; Firmicutes; Clostridia; Clostridiales; Ruminococcus). These data are consistent with no phylotype being present at more than 1.3% abundance in all samples.

[0147] The deeper pyrosequencing data confirmed this result. In the V6 dataset, using even sampling of 10,000 sequences/sample, the most abundant phylotype in each sample made up 12% of that sample on average (range: 5.0%-36.6%). The overall most abundant phylotype was found in all 33 samples (Bacteria; Firmicutes; Clostridia; Clostridiales; Eubacterium rectale). However, in some samples, this phylotype was present in frequencies as low as 0.01%.

[0148] The sampling model allows one to ask what level of abundance in every individual the most abundant phylotype could have before its absence from, or limited representation in some samples becomes surprising. For example, with 1,000 sequences/samples, it would be very surprising if a species at 50% abundance across all samples in any out of 30 samples was missed, but it would not be surprising if a species at 0.00001% abundance were missed.

[0149] The sampling model (using 1000 random sequences per sample) indicated that this minimum observed abundance was consistent with a ‘true abundance’ of no more than 0.66%. In the V2/3 dataset, the most abundant phylotype in each sample made up 14.6% of that sample on average (range: 3.8%-47.1%). The overall most abundant phylotype was present in 270 of 274 samples at this depth of coverage (Bacteria; Bacteroidetes; Bacteroidales; Bacteroidaceae). The sampling model indicated that this frequency was consistent with a true abundance of no more than 0.53%. These results were confirmed, with excellent agreement, by the V6 data: at 1,000 sequences/sample, the maximum abundance OTU is found in 32 of 33 samples, consistent with an abundance of no more than 0.66%. However, at a coverage depth of 10,000 sequences/sample, this OTU is found in all 33 samples but at a minimum observed abundance of 0.02%, consistent with a true abundance of no more than 0.1%. Using all the V6 data without controlling for sampling effort, the minimum observed abundance is consistent with a true abundance of no more than 0.07% (the estimate of the true abundance falls with increased sample size because it is less likely that the low frequency would be observed due to sampling error when more total sequences contribute to the result). Thus, we conclude, with 95% confidence, based on the even sampling used for the other analyses in this study (i.e., 1,000 sequences/sample from V2/3, 10,000 sequences/sample for V6) that the maximum abundance of any OTU across all samples cannot exceed the V2/3 result of 0.53%, although the true maximum abundance might be as much as an order of magnitude lower than this based on the greater depth of coverage in the V6 samples.

[0150] In summary, the analysis showed that no phylotype is present at more than ˜0.5% abundance in all of the samples in this study, and that although individual microbiotas are dominated by a few abundant phylotypes, these groups vary dramatically in their proportional representation in the sampled gut communities. Also, no phylotypes were detectable in all individuals sampled within this range of coverage (FIG. 7).

### Example 3

### Taxonomic Assignments of Metagenomic Reads

[0151] The International Human Microbiome Project has emphasized the importance of sequencing the genomes of a panel of reference microbial strains. Therefore, shotgun pyrosequencing was used to sample the fecal microbiomes of 18 individuals representing 6 of the families described in Example 1.

### Pyrosequencing of Total Community DNA

[0152] Shotgun sequencing runs were performed on the 454 FLX pyrosequencer from total community DNA of 3 lean European American MZ twin-pairs and their mothers plus 3 obese European American MZ twin pairs and their mothers, yielding 8,294,835 reads and 14,730 16S rRNA fragments. Two samples were also analyzed on a single run employing 454/Roche GS FLX Titanium extra long read sequencing technology (Tables 8 and 9). Sequencing reads with degenerate bases (“Ns”) were removed along with all duplicate sequences, as sequences of identical length and content are a common artifact of the pyrosequencing methodology. Finally, human sequences were removed by identifying sequences homologous to the H.

TABLE 8
Microbiome sequencing statistics

| | | | | | | | | | 16S rRNA |
|---|---|---|---|---|---|---|---|---|---|
| Subject | Data | Twin/ | | | | | Number | Filtered | gene |
| ID^{a} | ID | Mom | Family | BMI | Platform | Total nt | Reads | Reads^{b} | fragments^{c} |
| F1T1Le1 | TS1 | Twin | 1 | Lean | FLX | 60,016,519 | 254,044 | 217,386 | 439 |
| F1T2Le1 | TS2 | Twin | 1 | Lean | FLX | 90,271,969 | 514,022 | 443,640 | 512 |
| F1MOv1 | TS3 | Mom | 1 | Overweight | FLX | 113,506,401 | 571,301 | 510,972 | 723 |
| F2T1Le1 | TS4 | Twin | 2 | Lean | FLX | 107,008,761 | 472,154 | 414,754 | 626 |
| F2T2Le1 | TS5 | Twin | 2 | Lean | FLX | 112,835,879 | 553,142 | 490,776 | 928 |
| F2MOb1 | TS6 | Mom | 2 | Obese | FLX | 135,976,476 | 623,027 | 535,763 | 1,039 |
| F3T1Le1 | TS7 | Twin | 3 | Lean | FLX | 146,946,832 | 607,386 | 555,853 | 1,188 |
| F3T2Le1 | TS8 | Twin | 3 | Lean | FLX | 113,177,766 | 468,769 | 414,497 | 976 |
| F3MOv1 | TS9 | Mom | 3 | Overweight | FLX | 137,564,473 | 552,870 | 499,499 | 934 |
| F7T1Ob1 | TS19 | Twin | 7 | Obese | FLX | 95,538,760 | 583,989 | 498,880 | 569 |
| F7T2Ob1 | TS20 | Twin | 7 | Obese | FLX | 108,342,331 | 550,695 | 495,040 | 829 |
| F7MOb1 | TS21 | Mom | 7 | Obese | FLX | 95,960,723 | 451,177 | 413,772 | 774 |
| F10T1Ob1 | TS28 | Twin | 10 | Obese | Titanium | 138,364,927 | 399,717 | 302,780 | 652 |
| F10T2Ob1 | TS29 | Twin | 10 | Obese | Titanium | 239,971,702 | 672,196 | 502,399 | 1,190 |
| F10MOv1 | TS30 | Mom | 10 | Overweight | FLX | 105,932,316 | 564,184 | 495,865 | 791 |
| F15T1Ob1 | TS49 | Twin | 15 | Obese | FLX | 104,449,087 | 596,149 | 519,072 | 769 |
| F15T2Ob1 | TS50 | Twin | 15 | Obese | FLX | 129,037,456 | 642,191 | 549,700 | 1,209 |
| F15MOb1 | TS51 | Mom | 15 | Obese | FLX | 101,531,105 | 557,165 | 434,187 | 582 |
| | | | | | SUM | 2,136,433,483 | 9,634,178 | 8,294,835 | 14,730 |

^{a}ID nomenclature: Family Number, Twin number or mom, and BMI category (Le = lean, Ov = overweight, Ob = Obese; e.g. F1T1Le Stands for family 1, twin 1, lean)
^{b}Sequences used after removing low quality, duplicate, and human sequences
^{c}16S rRNA gene fragments identified in microbiome sequencing reads

sapiens reference genome (BLASTN e-value<10-5, %identity>75, and score>50).

[symbol]

9
Microbiome BLAST statistics^{a}

| | | | | | | Mean | | | | | | |
|---|---|---|---|---|---|---|---|---|---|---|---|---|
| | Data | Raw | Reads | % Sequences | Nucleotides | Read- | % | % | % | % | % | % |
| [symbol] ject ID^{a} | ID | Reads | Used | Used | Used | length | Hsa | RDP | KEGG | STRING | NR | Gut |
| 1 | TS1 | 254,044 | 217,386 | 85.6 | 51,708,794 | 237.9 | 0.42 | 0.21 | 29.1 | 34.5 | 54.9 | 57.9 |
| [symbol] 2Le1 | TS2 | 514,022 | 443,640 | 86.3 | 78,853,892 | 177.7 | 0.08 | 0.12 | 20.3 | 28.7 | 46.9 | 51.7 |
| [symbol] Ov1 | TS3 | 571,301 | 510,972 | 89.4 | 102,717,417 | 201.0 | 0.16 | 0.15 | 23.8 | 33.6 | 56.5 | 61.2 |
| [symbol] 1Le1 | TS4 | 472,154 | 414,754 | 87.8 | 95,003,113 | 229.1 | 0.14 | 0.15 | 26.2 | 44.5 | 72.3 | 74.9 |
| [symbol] 2Le1 | TS5 | 553,142 | 490,776 | 88.7 | 100,599,979 | 205.0 | 0.22 | 0.19 | 23.0 | 27.8 | 54.1 | 62.1 |
| [symbol] Ob1 | TS6 | 623,027 | 535,763 | 86.0 | 118,207,161 | 220.6 | 0.62 | 0.20 | 26.9 | 37.2 | 58.9 | 62.1 |
| [symbol] 1Le1 | TS7 | 607,386 | 555,853 | 91.5 | 134,889,015 | 242.7 | 0.13 | 0.22 | 26.9 | 34.0 | 58.4 | 61.7 |
| [symbol] 2Le1 | TS8 | 468,769 | 414,497 | 88.4 | 100,520,072 | 242.5 | 0.20 | 0.24 | 28.5 | 35.7 | 61.1 | 64.4 |
| [symbol] Ov1 | TS9 | 552,870 | 499,499 | 90.3 | 124,768,172 | 249.8 | 0.14 | 0.19 | 26.8 | 36.6 | 63.2 | 66.3 |
| [symbol] 1Ob1 | TS19 | 583,989 | 498,880 | 85.4 | 82,117,565 | 164.6 | 0.06 | 0.12 | 19.1 | 30.6 | 52.9 | 57.1 |
| [symbol] 2Ob1 | TS20 | 550,695 | 495,040 | 89.9 | 98,053,098 | 198.1 | 0.32 | 0.17 | 22.3 | 29.3 | 47.2 | 49.9 |
| [symbol] Ob1 | TS21 | 451,177 | 413,772 | 91.7 | 88,786,017 | 214.6 | 0.09 | 0.19 | 25.5 | 37.6 | 62.8 | 66.3 |
| [symbol] T1Ob1 | TS28 | 399,717 | 302,780 | 75.7 | 101,434,082 | 335.0 | 0.06 | 0.36 | 24.5 | 28.4 | 53.2 | 55.5 |
| [symbol] T2Ob1 | TS29 | 672,196 | 502,399 | 74.7 | 173,386,030 | 345.1 | 0.11 | 0.29 | 27.5 | 34.8 | 63.2 | 63.9 |
| [symbol] MOv1 | TS30 | 564,184 | 495,865 | 87.9 | 94,405,318 | 190.4 | 0.21 | 0.16 | 22.4 | 32.0 | 54.7 | 60.7 |
| [symbol] T1Ob1 | TS49 | 596,149 | 519,072 | 87.1 | 91,987,878 | 177.2 | 0.29 | 0.15 | 18.6 | 23.0 | 43.7 | 46.4 |
| [symbol] T2Ob1 | TS50 | 642,191 | 549,700 | 85.6 | 111,999,603 | 203.7 | 0.24 | 0.22 | 24.6 | 29.4 | 51.9 | 57.9 |
| [symbol] MOb1 | TS51 | 557,165 | 434,187 | 77.9 | 81,330,211 | 187.3 | 0.40 | 0.14 | 21.0 | 26.3 | 44.2 | 43.9 |

| | | | | | | | | | | | |
|---|---|---|---|---|---|---|---|---|---|---|---|
| Average | 535,232 | 460,824 | 86.1 | 101,709,301 | 223.5 | 0.22 | 0.19 | 24.3 | 32.5 | 55.6 | 59.1 |
| Sum | 9,634,178 | 8,294,835 | — | 1,830,767,417 | — | — | — | — | — | — | — |

^{a}Key: % sequences used = percentage of sequences remaining after removing low quality, duplicate, and human sequences; Hsa = reads matching the H. sapiens genome; % RDP = percentage of reads matching the RDP 16S rRNA database; % KEGG, % STRING, % NR = percentage of reads that were assignable to entries in these various databases; % Gut = percentage of reads assigned to the database of 42 reference genomes [symbol]
indicates data missing or illegible when filed

### Database Searches and Metabolic Reconstructions

[0153] The distributions of taxa, genes, orthologs, metabolic pathways, and high-level gene categories were tallied based on the corresponding annotation of the best-BLAST-hit sequence found in each reference database. For KEGG analysis, the closest matching gene with an annotation was used, since many genes in the database remain unannotated, including all KEGG orthologous groups (KOs) assigned to genes with an identical e-value (commands −e 0.00001−m 9-b 100 were used to run NCBI BLASTX). Custom Perl scripts were used for all KEGG, STRING, and NCBI NR analyses. Selected genes from recently sequenced reference genomes were manually annotated using NCBI-BLASTP searches against the KEGG, STRING, and NR database. The 42 reference genome database includes predicted proteins from draft or complete assemblies of Alistipes putredinis, Bacteroides WH2, Bacteroides thetaiotaomicron 3731, Bacteroides thetaiotaomicron 7330, Bacteroides thetaiotaomicron 5482, Bacteroides fragilis, Bacteroides caccae, Bacteroides distasonis, Bacteroides ovatus, Bacteroides stercoris, Bacteroides uniformis, Bacteroides vulgatus, Parabacteroides merdae, Anaerostipes caccae, Anaerotruncus colihominis, Anaerofustis stercorihominis, Bacteroides capillosus, Clostridium bartlettii, Clostridium bolteae, Clostridium eutactus, Clostridium leptum, Clostridium ramosum, Clostridium scindens, Clostridium sp.L2-50, Clostridium spiroforme, Dorea longicatena, Eubacterium dolichum, Eubacterium eligens, Eubacterium rectale, Eubacterium siraeum, Eubacterium ventriosum, Faecalibacterium prausnitzii M212, Peptostreptococcus micros, Ruminococcus gnavus, Ruminococcus obeum, Ruminococcus torques, Collinsella aerofaciens, Bifidobacterium adolescentis, Bifidobacterium longum, Escherichia coli K12, Methanobrevibacter smithii, and Methanobrevibacter stadtmanae (see http://genome.wustl.edu/pub/ and NCBI GenBank). Draft assemblies of Clostridium sp. SS2-1 and Clostridium symbiosum were also used for functional clustering and diversity analyses (http://genome.wustl.edu/pub/). Coverage plots (percent identity plots) were generated using nucmer and mummerplot (part of the MUMmer v3.19 package), and default parameters.

[0154] Annotations were validated with simulated datasets (FIG. 8). To do so, the frequency of annotated genes from the KEGG database (v44) was first tallied across the aggregate human gut microbiomes (n=18 datasets). The 1,000 most frequent microbial genes were then used to generate ‘simulated reads’ between 50 and 500 nt long. The simulated reads were subsequently annotated (BLASTX against the KEGG database), with self-hits excluded. This analysis revealed a low rate of false positives (i.e. high precision), but using very short sequences (e.g. 50-100 nt) increased the rate of false negatives (lower sensitivity) (FIG. 8). Given the increased read-length relative 454 GS20 pyrosequencing data, simulated reads with an average length comparable to our data (200-250 nt), demonstrated robust assignments with an e-value<10⁻⁵, % identity>50, and/or bit-score>50. Using all three cutoffs, sequences 200 nt in length returned 81.5% of the correct assignments, with a precision of 0.93 and sensitivity of 0.88, similar to what was observed by re-annotating the original full-length gene sequences after ignoring self-hits. The KEGG cutoff criteria were also applied to BLASTX analysis results for STRING-based predictions, given the similar size of the databases.

[0155] ABI 3730xl capillary sequencing reads from 9 previously published adult human gut microbiomes were obtained from the NCBI TraceArchive. The full dataset from each sample was annotated by BLASTX comparisons against the KEGG and STRING database (see above; BLASTX e-value<10⁻⁵, % identity>50, and score>50). To allow quantitative comparisons between these datasets and pyrosequencing data, all forward sequencing reads was first extracted and then one ‘simulated pyrosequencer read’ from each longer capillary read was generated. Nucleotides spanning positions 100 to 322 were used from all capillary reads of suitable length, to avoid low quality regions that commonly occur at the beginning and end of the reads. These simulated reads were then annotated as described above.

[0156] 16S rRNA gene fragments were identified in each microbiome through BLASTN searches of the RDP database (version 9.33; e-value<10⁻⁵; Bit-score>50; % identity>50; alignment length100). Putative 16S rRNA gene fragments were then aligned using the NAST multi-aligner with a minimum template length of 100 bases and minimum % identity of 75%. Taxonomy was assessed after insertion into an ARB neighbor-joining tree.

[0157] Microbiomes were clustered based on their profiles after normalizing across all sampled communities (z-score), using the Pearson's correlation distance metric, followed by single-linkage hierarchical clustering in addition to Principal Components Analysis (Cluster3.0). Results were visualized using the Treeview Java applet. Functional diversity (Shannon index and evenness) was calculated using the number of assignements in each microbiome to each of the 254 pathways present in the KEGG database (EstimateS 8.0). The maximum possible index is the natural log of the total number of pathways: In (254) or 5.54. Shannon evenness was calculated by dividing the Shannon index for a given microbiome by the maximum possible index (scale of 0 to 1, with 1 representing a microbiome with all pathways found at an equal abundance). Results were compared to simulated metagenomic reads generated from 36 recently sequenced reference human gut-derived Bacteroidetes and Firmicutes genomes (http://genome.wustl.edu/pub/organism/). Reads were produced by Readsim v0.10, using the following options: −n 10000−modlr normal−meanlr 223−stdlr 0.3. The mean and standard deviation for length of the simulated reads was based on the observed read-length distribution of the 18 fecal microbiome datasets (Table 9).

### Results

[0158] One fundamental parameter that governs the utility of reference genomes is the ability to accurately assign fragmentary reads from metagenomic datasets to these genomes. Therefore, the filtered pyrosequencing reads from the fecal microbiomes of 18 individuals from the 6 different families described in Example 1 (3 lean twin-pairs and their mothers; 3 obese twin pairs and their mothers; Tables 1 and 2) were compared to a custom database of 42 human gut associated bacterial and archaeal genomes (FIG. 7) using BLASTX, and validated these assignments independently against NCBI's non-redundant protein database. The relative abundance of sequences from the 18 individual microbiome datasets assigned to each reference genome was highly variable (see FIG. 9; R²=0.26±0.02 for all pairwise comparisons of taxonomic profiles), consistent with the considerable heterogeneity in microbial community structure among the fecal microbiomes observed from sequencing 16S rRNA gene amplicons.

[0159] The custom database of 42 reference genomes included 23 Firmicutes but only 13 Bacteroidetes. Since the Firmicutes dominate the gut microbiotas of subjects (FIG. 6) and the reference genome database, it might be expected that reads assigned to Firmicutes would match the reference genomes more closely than reads assigned to Bacteroidetes. The opposite was true: on average, 46.3±2.6% of the pyrosequencing reads assigned to Bacteroidetes matched the reference genomes at 100% identity, as compared to only 16.7±1.1% of the reads assigned to Firmicutes (p<10⁻⁴, Mann Whitney; FIGS. 10 and 11). This observation underscores the high level of phylogenetic and genomic diversity within the gut-associated Firmicutes, indicates that the readily culturable sequenced gut Firmicutes are not closely related to the abundant gut genomes present in the 18 gut microbiomes, and suggests that future reference microbial genome sequencing efforts should be directed towards representatives of this dominant phylum.

[0160] The effect of technical advances that produce longer reads on improving these assignments was also tested by sequencing fecal community samples from one twin pair using next-generation Titanium pyrosequencing methods [average read length of 341±134 nt (SD) versus 208±68 for the standard FLX platform]. FIG. 12 shows that the frequency and quality of sequence assignments is improved as read length increases from 200 to 350 nt.

[0161] FIG. 13 summarizes the relative abundance of the major bacterial phyla present in these 18 microbiomes, as defined by six different approaches (sequencing full-length, V2/3 and V6 amplicons; BLAST comparisons of shotgun pyrosequencer reads with the NCBI non-redundant and the custom 42 gut genome databases, plus analysis of 16S rRNA gene fragments). Pairwise comparisons of relative abundance data from 16S rRNA gene fragments generated from shotgun sequencing reads correlate most closely with V2/3 PCR data (FIG. 13 and Table 7).

### Example 4

### In Silico Functional Analysis of Gut Microbiomes

[0162] The filtered sequences obtained in Example 3 from the 18 microbiomes were used to conduct a functional analysis of gut microbiomes.

### CAZyme Analysis

[0163] Metagenomic sequence reads described in Example 3 were searched against a library of modules derived from all entries in the Carbohydrate-Active enZymes (CAZy) database (www.cazy.org using FASTY, e-value<10⁻⁶). This library consists of ˜180,000 previously annotated modules (catalytic modules, carbohydrate binding modules (CBMs) and other non-catalytic modules or domains of unknown function) derived from ˜80,000 protein sequences. The number of sequencing reads matching each CAZy family was divided by the number of total sequences assigned to CAZymes and multiplied by 100 to calculate a relative abundance. An R² value was calculated for each pair of CAZy profiles. The distribution of glycoside hydrolase similarity scores was then compared to the distribution of glycosyltransferase similarity scores.

### Statistical Analyses

[0164] Xipe (version 2.4) was employed for bootstrap analyses of pathway enrichment and depletion, using the parameters sample size=10,000 and confidence level=0.95. Linear regressions were performed in Excel (version 11.0, Microsoft). Mann-Whitney and Student's t-tests were utilized to identify statistically significant differences between two groups (Prism v4.0, GraphPad; Excel version 11.0, Microsoft). The Bonferroni correction was used to correct for multiple hypotheses. The Mantel test was used to compare distance matrices: the matrix of each pairwise comparison of the abundance of each reference genome, and the abundance of each metabolic pathway, were compared (Mantel program in Python using PyCogent; 10,000 replicates). Data are represented as mean±SEM unless otherwise indicated.

[0165] Odds ratios were used to identify ‘commonly-enriched’ genes in the gut microbiome. In short, all gut microbiome sequences were compared against the custom database of 42 gut genomes (BLASTX e-value<10⁻⁵, bitscore>50, and % identity>50). A gene by sample matrix was then screened to identify genes ‘commonly-enriched’ in either the obese or lean gut microbiome (defined by an odds ratio greater than 2 or less than 0.5 when comparing the pooled obese twin microbiomes to the pooled lean twin microbiomes and when comparing each individual obese twin microbiome to the aggregate lean twin microbiome, or vice versa). The statistical significance of enriched or depleted genes was then calculated using a modified t-test (q-value<0.05; calculated with code kindly supplied by Mihai Pop and J. R. White, University of Maryland). To search for genes that were consistently enriched or depleted in all six MZ twin-pairs, a gene-by-sample matrix was generated based on BLASTX comparisons of each microbiome with our custom 42-genome database, and an odds ratio was calculated by directly comparing the frequency of each gene in each twin versus the respective co-twin. The analysis revealed only 49 genes (odds ratio>2 or <0.5): they represent a variety of taxonomic groups, including Firmicutes, Bacteroidetes, and Actinobacteria and did not show any clear functional trends.

### Results

[0166] Sequences matching 156 total CAZyme families were found within at least one human gut microbiome, including 77 glycoside hydrolase, 21 carbohydrate-binding module, 35 glycosyltransferase, 12 polysaccharide lyase, and 11 carbohydrate-esterase families (Table 10A and B). On average 2.62±0.13% of the gut microbiome could be assigned to CAZymes (a total of 217,615 sequences), a percentage that is greater than the most abundant KEGG pathway in the gut microbiome (Transporters'; 1.20±0.06%), and indicative of the abundant and diverse set of microbial genes in the distal gut microbiome directed towards accessing a wide range of polysaccharides.

[0167] Category-based clustering of the functions from each microbiome was performed using Principal Components Analysis (PCA) and hierarchical clustering. This analysis revealed two distinct clusters of gut microbiomes based on metabolic profile, corresponding to samples with an increased abundance of Firmicutes and Actinobacteria, and samples with a high abundance of Bacteroidetes (FIG. 14A). A linear regression of the first principal component (PC1, explaining 20% of the functional variance) and the relative abundance of the Bacteroidetes showed a highly significant correlation (R²=0.96, p<10-12; FIG. 14B). Functional profiles stabilized within each individual's microbiome after ˜20,000 sequences had been accumulated (FIG. 15). Family members had more similar functional profiles than unrelated individuals (FIG. 14C), suggesting that shared bacterial community structure (who's there based on 16S rRNA analyses) also translates into shared community-wide relative abundance of metabolic pathways. Accordingly, a direct comparison of functional and taxonomic similarity disclosed a significant association: individuals that share similar taxonomic profiles also share similar metabolic profiles (p<0.001; Mantel test).

TABLE 10A
Relative abundance of CAZymes across 9 gut microbiomes
(% of sequence assignments across all identified CAZymes)^{a}

| Subject ID^{b} | F1T1Le | F1T2Le | F1MOv | F2T1Le | F2T2Le | F2MOb | F3T1Le | F3T2Le | F3MOv |
|---|---|---|---|---|---|---|---|---|---|
| Glycoside hydrolases | 70.56 | 73.96 | 72.14 | 72.40 | 68.38 | 67.37 | 68.69 | 67.84 | 69.92 |
| GH13 | 8.96 | 6.31 | 6.37 | 3.97 | 10.78 | 8.04 | 8.63 | 9.97 | 8.02 |
| GH2 | 7.40 | 7.10 | 7.01 | 6.51 | 5.13 | 5.49 | 5.81 | 6.02 | 5.94 |
| GH43 | 3.48 | 5.78 | 5.63 | 6.61 | 4.39 | 4.69 | 5.05 | 4.14 | 5.75 |
| GH92 | 3.44 | 6.25 | 5.00 | 7.70 | 3.25 | 5.47 | 3.28 | 2.65 | 4.50 |
| GH3 | 5.72 | 5.37 | 4.31 | 4.47 | 3.20 | 3.94 | 4.03 | 4.70 | 4.09 |
| GH97 | 1.97 | 5.45 | 4.01 | 4.67 | 1.18 | 3.38 | 3.51 | 2.23 | 3.91 |
| GH31 | 2.98 | 2.48 | 2.53 | 2.41 | 3.84 | 2.11 | 2.16 | 3.04 | 2.13 |
| GH20 | 2.40 | 2.30 | 2.35 | 3.34 | 1.93 | 2.93 | 1.99 | 1.92 | 2.19 |
| GH29 | 1.99 | 1.51 | 2.12 | 2.54 | 2.94 | 2.52 | 2.53 | 2.19 | 1.83 |
| GH77 | 2.13 | 1.39 | 1.43 | 0.86 | 2.18 | 2.18 | 2.18 | 2.45 | 1.99 |
| GH28 | 1.58 | 2.44 | 3.71 | 3.07 | 1.46 | 2.24 | 2.25 | 1.79 | 2.00 |
| GH51 | 1.18 | 1.51 | 1.38 | 1.44 | 2.12 | 1.58 | 1.73 | 1.68 | 1.31 |
| GH36 | 1.62 | 1.12 | 1.19 | 0.99 | 1.80 | 1.23 | 1.64 | 2.02 | 1.37 |
| GH1 | 1.51 | 0.87 | 1.02 | 0.34 | 2.90 | 1.08 | 1.50 | 1.50 | 1.67 |
| GH5 | 1.95 | 2.41 | 1.75 | 1.53 | 1.07 | 0.98 | 2.62 | 1.45 | 1.95 |
| GH42 | 0.91 | 0.49 | 0.83 | 0.90 | 2.43 | 0.62 | 1.09 | 1.10 | 1.03 |
| GH105 | 1.56 | 1.65 | 2.07 | 2.07 | 1.01 | 1.38 | 1.46 | 1.27 | 1.83 |
| GHY95 | 1.56 | 1.18 | 1.36 | 1.24 | 0.91 | 1.21 | 1.22 | 1.04 | 0.99 |
| GH32 | 0.91 | 0.61 | 0.70 | 0.75 | 2.12 | 1.18 | 1.05 | 0.91 | 0.84 |
| GH78 | 1.91 | 1.09 | 1.22 | 1.61 | 0.60 | 0.70 | 1.05 | 0.89 | 1.25 |
| Glycosyltransferases | 20.25 | 17.20 | 17.49 | 16.26 | 23.34 | 21.64 | 22.09 | 22.78 | 19.66 |
| GT2 | 5.66 | 6.26 | 6.31 | 5.58 | 7.68 | 7.91 | 7.14 | 7.48 | 7.39 |
| GT4 | 3.55 | 3.76 | 3.96 | 4.44 | 4.93 | 4.43 | 4.64 | 4.60 | 4.20 |
| GT35 | 4.75 | 2.47 | 2.07 | 1.62 | 4.75 | 2.85 | 3.58 | 3.91 | 2.90 |
| GT28 | 1.51 | 0.85 | 0.89 | 0.53 | 1.51 | 1.00 | 1.34 | 1.48 | 1.00 |
| GT5 | 1.74 | 0.77 | 0.79 | 0.33 | 1.72 | 0.81 | 1.38 | 1.62 | 1.15 |
| GT51 | 0.77 | 0.78 | 0.75 | 0.74 | 0.99 | 1.08 | 0.92 | 1.17 | 0.80 |
| Carbohydrate binding | 1.76 | 2.40 | 2.15 | 2.02 | 2.05 | 2.22 | 2.38 | 2.25 | 2.11 |
| molecules | | | | | | | | | |
| Carbohydrate esterases | 5.89 | 4.70 | 5.45 | 5.53 | 5.00 | 5.81 | 5.64 | 5.36 | 6.04 |
| CE4 | 1.53 | 1.01 | 1.03 | 0.78 | 1.41 | 1.04 | 1.16 | 1.27 | 1.20 |
| Polysaccharide lyases | 1.55 | 1.74 | 2.77 | 3.79 | 1.22 | 2.95 | 1.20 | 1.78 | 2.27 |

^{a}Groups found at an average relative abundance 1% are shown
^{b}ID nomenclature: Family number, Twin number or mother and BMI category (Le = lean, Ov = overweight, Ob = obese e.g. F1T1Le stands for family 1 twin 1 lean)

TABLE 10B
Relative abundance of CAZymes across 9 gut microbiomes (% of sequence assignments
across all identified CAZymes)^{a}

| Subject ID^{b} | F4T1Ob | F4T2Ob | F4MOb | F5T1Ob | F5T2Ob | F5MOv | F6T1Ob | F6T2Ob | F6MOb |
|---|---|---|---|---|---|---|---|---|---|
| Glycoside hydrolases | 73.46 | 70.45 | 71.57 | 64.19 | 69.11 | 69.96 | 68.15 | 69.61 | 71.50 |
| GH13 | 4.68 | 8.36 | 6.37 | 11.17 | 11.80 | 7.05 | 12.34 | 16.84 | 11.19 |
| GH2 | 6.43 | 6.53 | 6.53 | 5.52 | 5.40 | 5.93 | 5.69 | 5.64 | 6.21 |
| GH43 | 5.80 | 6.49 | 5.00 | 4.34 | 6.57 | 5.04 | 5.05 | 5.59 | 4.56 |
| GH92 | 7.66 | 4.36 | 6.72 | 1.71 | 1.73 | 5.70 | 1.93 | 0.60 | 3.59 |
| GH3 | 3.46 | 3.77 | 4.27 | 3.89 | 5.07 | 3.75 | 3.75 | 4.29 | 3.41 |
| GH97 | 4.06 | 3.95 | 3.62 | 0.96 | 1.25 | 3.96 | 1.22 | 0.28 | 1.87 |
| GH31 | 2.67 | 2.06 | 2.49 | 2.86 | 3.37 | 2.52 | 2.81 | 3.99 | 2.79 |
| GH20 | 3.33 | 2.45 | 3.32 | 1.09 | 1.17 | 3.12 | 1.66 | 0.92 | 3.18 |
| GH29 | 3.93 | 1.53 | 3.31 | 1.80 | 1.47 | 2.59 | 1.51 | 0.93 | 1.81 |
| GH77 | 1.32 | 1.95 | 1.49 | 2.87 | 2.95 | 1.62 | 2.64 | 3.47 | 2.04 |
| GH28 | 2.63 | 1.99 | 2.49 | 1.64 | 1.01 | 2.31 | 1.44 | 0.54 | 1.11 |
| GH51 | 1.73 | 2.29 | 1.51 | 1.80 | 2.74 | 1.40 | 1.71 | 2.34 | 1.60 |
| GH36 | 1.24 | 1.79 | 1.39 | 1.52 | 1.92 | 1.28 | 2.20 | 2.63 | 2.37 |
| GH1 | 0.72 | 0.79 | 0.71 | 2.01 | 2.50 | 1.35 | 3.74 | 2.29 | 2.25 |
| GH5 | 1.37 | 2.56 | 1.30 | 1.29 | 1.37 | 0.90 | 0.84 | 1.22 | 0.95 |
| GH42 | 0.94 | 0.44 | 0.98 | 1.80 | 2.82 | 0.93 | 2.26 | 3.87 | 2.06 |
| GH105 | 1.77 | 0.83 | 1.63 | 0.95 | 0.50 | 1.65 | 0.98 | 0.39 | 0.83 |
| GHY95 | 1.33 | 1.90 | 1.12 | 0.68 | 0.75 | 1.35 | 1.01 | 0.48 | 1.44 |
| GH32 | 0.99 | 1.15 | 0.82 | 1.15 | 1.52 | 0.99 | 1.47 | 2.04 | 1.00 |
| GH78 | 1.43 | 1.45 | 0.98 | 1.03 | 1.39 | 0.80 | 0.90 | 0.58 | 1.21 |
| Glycosyltransferases | 16.68 | 20.34 | 18.24 | 26.36 | 23.15 | 19.53 | 23.54 | 23.99 | 21.50 |
| GT2 | 6.19 | 6.80 | 6.97 | 9.41 | 9.80 | 6.74 | 7.98 | 7.14 | 6.78 |
| GT4 | 4.17 | 3.99 | 4.08 | 5.62 | 4.43 | 4.50 | 4.42 | 4.18 | 4.80 |
| GT35 | 1.81 | 2.76 | 2.13 | 4.50 | 3.78 | 2.59 | 4.42 | 5.25 | 3.66 |
| GT28 | 0.58 | 0.94 | 0.83 | 1.31 | 1.00 | 1.01 | 1.48 | 2.12 | 1.33 |
| GT5 | 0.46 | 0.83 | 0.65 | 1.54 | 1.24 | 0.96 | 1.74 | 1.90 | 0.96 |
| GT51 | 0.68 | 1.06 | 0.72 | 1.82 | 1.27 | 0.88 | 1.06 | 1.63 | 1.02 |
| Carbohydrate binding | 1.90 | 2.06 | 2.15 | 2.66 | 2.88 | 2.08 | 2.22 | 2.28 | 1.98 |
| molecules | | | | | | | | | |
| Carbohydrate esterases | 5.19 | 5.19 | 5.02 | 5.24 | 3.94 | 6.01 | 4.68 | 3.84 | 4.15 |
| CE4 | 0.73 | 0.84 | 0.92 | 1.35 | 0.96 | 1.04 | 1.31 | 1.51 | 0.91 |
| Polysaccharide lyases | 2.78 | 1.95 | 3.02 | 1.55 | 0.93 | 2.43 | 1.43 | 0.28 | 0.87 |

^{a}Groups found at an average relative abundance 1% are shown
^{b}ID nomenclature: Family number, Twin number or mother and BMI category (Le = lean, Ov = overweight, Ob = obese e.g. F1T1Le stands for family 1 twin 1 lean)

### Example 5

### Different Functions for Bacteroides and Firmicutes

[0168] Functional clustering of phylum-wide sequence bins representing reads from the Firmicutes or the Bacteroidetes showed discrete clustering by phylum (FIG. 16A). A direct comparison of the Firmicutes and Bacteroidetes sequence bins to simulated reads generated from 36 reference Bacteroides and Firmicute genomes represented in the 42 member custom database described in Example 3, revealed that the metabolic profile of each microbiome was similar to the ‘average’ metabolic profile of each phylum (FIG. 17). Bootstrap analyses of the relative abundance of metabolic pathways in the Firmicutes and Bacteroidetes, disclosed 26 pathways with a significantly different relative abundance (FIG. 16A). The Bacteroidetes were enriched for a number of carbohydrate metabolism pathways, while the Firmicutes were enriched for transport systems. The finding is consistent with information gleaned from a number of sequenced Bacteroidetes genomes that demonstrate expansive families of genes involved in carbohydrate metabolism, as well as the CAZyme analysis in Example 3, which revealed a significantly higher relative abundance of glycoside hydrolases, carbohydrate-binding modules, glycosyltransferases, polysaccharide lyases, and carbohydrate esterases in the Bacteroidetes sequence bins (FIG. 16B).

### Example 6

### Identifying a Core Human Gut Microbiome

[0169] One of the major goals of the international human microbiome project is to determine whether there is an identifiable ‘core microbiome’ of shared organisms, genes, or functional capabilities found in a given body habitat of all or the vast majority of humans. Although all of the 18 gut microbiomes surveyed showed a high level of beta-diversity with respect to the relative abundance of bacterial phyla (FIG. 18A), analysis of the relative abundance of broad functional categories of genes (COG) and metabolic pathways (KEGG) revealed a generally consistent pattern regardless of the sample surveyed (FIG. 18B and Table 11): the pattern is also consistent with results obtained from a meta-analysis of previously published gut microbiome datasets from 9 adult individuals (FIG. 19). This consistency was not simply due to the broad level of these annotations, as a similar analysis of Bacteroidetes and Firmicutes reference genomes revealed substantial variation in the relative abundance of each category (FIG. 20). Furthermore, pair-wise comparisons of metabolic profiles revealed an average R² of 0.97±0.0023 (FIG. 14A), indicating a high level of functional similarity between adult human gut microbiomes.

TABLE 11
Relative abundance of metabolic pathways in
the gut microbiome (% of KEGG assignments)^{a}

| | Mean ± sem across |
|---|---|
| KEGG Metabolic Pathway | all 18 microbiomes |
| Transporters | 4.93 ± 0.21 |
| Other replication, recombination and repair proteins | 3.35 ± 0.04 |
| ABC transporters | 3.24 ± 0.13 |
| General function prediction only | 2.60 ± 0.06 |
| Purine metabolism | 2.29 ± 0.02 |
| Other enzymes | 2.16 ± 0.03 |
| Aminoacyl-tRNA biosynthesis | 2.14 ± 0.05 |
| Glutamate metabolism | 1.98 ± 0.03 |
| Starch and sucrose metabolism | 1.92 ± 0.03 |
| Pyruvate metabolism | 1.73 ± 0.02 |
| Pyrimidine metabolism | 1.70 ± 0.02 |
| Peptidases | 1.69 ± 0.05 |
| Alanine and aspartate metabolism | 1.58 ± 0.02 |
| Glycine, serine and threonine metabolism | 1.53 ± 0.02 |
| Other translation proteins | 1.37 ± 0.02 |
| Galactose metabolism | 1.37 ± 0.03 |
| Glycolysis/Gluconeogenesis | 1.35 ± 0.02 |
| Other ion-coupled transporters | 1.34 ± 0.06 |
| Fructose and mannose metabolism | 1.31 ± 0.03 |
| Two-component system | 1.31 ± 0.03 |
| Ribosome | 1.27 ± 0.03 |
| Replication complex | 1.18 ± 0.02 |
| Phenylalanine; tyrosine and tryptophan biosynthesis | 1.17 ± 0.02 |
| Valine, leucine and isoleucine biosynthesis | 1.15 ± 0.02 |
| Carbon fixation | 1.15 ± 0.01 |
| Nitrogen metabolism | 1.13 ± 0.02 |
| Glycerolipid metabolism | 1.07 ± 0.02 |
| Oxidative phosphorylation | 1.07 ± 0.03 |
| Butanoate metabolism | 1.05 ± 0.02 |
| Chaperones and folding catalysts | .99 ± 0.01 |
| Pentose phosphate pathway | .95 ± 0.01 |
| Tyrosine metabolism | .95 ± 0.02 |
| Histidine metabolism | .92 ± 0.02 |
| Cell division | .91 ± 0.01 |
| Aminosugars metabolism | .89 ± 0.03 |
| Arginine and proline metabolism | .85 ± 0.01 |
| Citrate cycle (TCA cycle) | .84 ± 0.02 |
| Methlionine metabolism | .83 ± 0.02 |
| Lysine biosynthesis | .82 ± 0.01 |
| RNA polymerase | .81 ± 0.02 |
| Reductive carboxylate cycle (CO2 fixation) | .80 ± 0.03 |
| Propanoate metabolism | .80 ± 0.01 |
| Peptidoglycan biosynthesis | .79 ± 0.01 |
| N-Glycan degradation | .78 ± 0.05 |
| Urea cycle and metabolism of amino groups | .78 ± 0.01 |
| Translation factors | .78 ± 0.02 |
| Selenoamino acid metabolism | .77 ± 0.02 |
| Glyoxylate and dicarboxylate metabolism | .73 ± 0.01 |
| DNA polymerase | .72 ± 0.01 |
| Pentose and glucuronate interconversions | .70 ± 0.02 |
| Cysteine metabolism | .68 ± 0.02 |
| Pantothenate and CoA biosynthesis | .67 ± 0.01 |
| Nucleotide sugars metabolism | .67 ± 0.02 |
| Glycosaminoglycan degradation | .66 ± 0.04 |
| Function unknown | .66 ± 0.01 |
| One carbon pool by folate | .65 ± 0.01 |
| Sphingolipid metabolism | .64 ± 0.03 |
| Protein export | .62 ± 0.01 |

^{a}Pathways with an average relative abundance of >0.6% are shown

[0170] Overall functional diversity was compared using the Shannon index, a measurement that combines diversity (the number of different types of metabolic pathways) and evenness (the relative abundance of each pathway). The human gut microbiomes surveyed had a stable and high Shannon index value (4.63±0.01), close to the maximum possible level of functional diversity (5.54; See Example 4). Despite the presence of a small number of abundant metabolic pathways (listed in Table 11), the overall functional profile of each gut microbiome is quite even (Shannon evenness of 0.84±0.001 on a scale of 0 to 1), demonstrating that most metabolic pathways are found at a similar level of abundance. Interestingly, the level of functional diversity in each microbiome was significantly linked to the relative abundance of the Bacteroidetes (R²=0.81, p<10⁻⁶); microbiomes enriched for Firmicutes/Actinobacteria had a decreased level of functional diversity. This observation is consistent with an analysis of simulated metagenomic reads generated from each of 36 Bacteroidetes and Firmicutes genomes (FIG. 21): on average, the Bacteroidetes genomes have a significantly higher level of both functional diversity and evenness (Mann-Whitney, p<0.01).

[0171] At a finer level, 26-53% of ‘enzyme’-level functional groups were shared across all 18 microbiomes, while 8-22% of the groups were unique to a single microbiome (FIGS. 22A-C). The ‘core’ functional groups present in all microbiomes were also highly abundant, representing 93-98% of the sequences found in the gut (fecal) microbiome. Given the higher relative abundance of these ‘core’ groups, >95% were found after 26.11±2.02 Mb of sequence was collected from a given microbiome, whereas the ‘variable’ groups continue to increase substantially with each additional Mb sequence. Of course, any estimate of the total size of the core microbiome will be dependent upon sequencing effort, especially for functional groups found at a low abundance. On average, this survey achieved greater than 450,000 sequences per fecal sample, which, assuming an even distribution, would allow us to sample groups found at a relative abundance of 10⁻⁴. In order to estimate the total size of the core microbiome based on the 18 sampled individuals, each microbiome was randomly sub-sampled in 1,000 sequence intervals (FIG. 22D). Based on this analysis, the core microbiome is approaching a total of 2,142 total orthologous groups (one site binding hyperbola curve fit to the resulting rarefaction curve, R²=0.9966), indicating that 93% of functional groups (defined by STRING) found within the core microbiome, were already identified. Of these core groups, 64% (KEGG) and 56% (STRING) were also found in 9 previously published but much lower coverage datasets generated by capillary sequencing of adult fecal DNA (average of 78,413±2,044 bidirectional reads/sample).

[0172] Metabolic reconstructions of the ‘core’ microbiome revealed significant enrichment for a number of expected functional categories, including those involved in transcription, translation, and amino acid metabolism (FIG. 23). Metabolic profile-based clustering indicated that the representation of ‘core’ functional groups was highly consistent across samples (FIG. 24), and includes a number of pathways likely important for life in the gut, such as those for carbohydrate and amino acid metabolism (e.g. fructose/mannose metabolism, aminosugars metabolism, and N-Glycan degradation). Variably represented pathways and categories include cell motility (only a subset of Firmicutes produce flagella), secretion systems, and membrane transport such as phosphotransferase systems involved in the import of nutrients, including sugars (FIGS. 23 and 24).

[0173] CAZyme profiles of glycoside hydrolases and glycosyltransferases were compared by calculating the R² value between each pair of microbiomes (see Table 10 for families with a relative abundance >1%). This analysis revealed that all individuals have a similar profile of glycosyltransferases (mean R²=0.96±0.003), while the profiles of glycoside hydrolases were significantly more variable, even between family members (mean R²=0.80±0.01; p<10-30, paired Student's t-test). This suggests that the number and spectrum of glycoside hydrolases is probably affected by external factors such as diet more than the glycosyltransferases.

### Example 7

### Obesity Associated Pathways

[0174] To identify metabolic pathways associated with obesity, only non-core associated (variable) functional groups were included in a comparison of the gut microbiomes of lean and obese twin pairs. A bootstrap analysis was used to identify metabolic pathways that were enriched or depleted in the variable obese gut microbiome. For example, similar to a mouse model of diet-induced obesity, the obese human gut microbiome was enriched for phosphotransferase systems involved in microbial processing of carbohydrates (Table 12). To identify specific genes that were significantly associated with obesity, all gut microbiome sequences were compared against the custom database of 42 gut genomes described in example 3. A gene-by-sample matrix was then screened to identify genes ‘commonly-enriched’ in either the obese or lean gut microbiome (defined by an odds ratio>2 or <0.5 when comparing all obese twin microbiomes to the aggregate lean twin microbiome or vice versa). The analysis yielded 383 genes that were significantly different between the obese and lean gut microbiome (q-value<0.05; 273 enriched and 110 depleted in the obese microbiome; see Tables 13 and 14). By contrast, only 49 genes were consistently enriched or depleted between all twin-pairs.

[0175] These obesity-associated genes were representative of the taxonomic differences described above: 75% of the obesity-enriched genes were from Actinobacteria (vs. 0% of lean-enriched genes; the other 25% are from Firmicutes) while 42% of the lean-enriched genes were from Bacteroidetes (vs. 0% of the obesity-enriched genes). Their functional annotation indicated that many are involved in carbohydrate, lipid, and amino acid metabolism (Tables 13-14). Together, they comprise an initial set of microbial biomarkers of the obese gut microbiome.

TABLE 12
Pathways enriched or depleted in obese gut microbiomes^{a}

| | |
|---|---|
| Enriched | Fatty acid biosynthesis |
| | Nicotinate and nicotinamide metabolism |
| | Other ion-coupled transporters |
| | Pentose and glucuronate interconversions |
| | Phosphotransferase system (PTS) |
| | Protein folding and associated processing |
| | Signal transduction mechanisms |
| | Transcription factors |
| Depleted | Bacterial chemotaxis |
| | Bacterial motility proteins |
| | Benzoate degradation via CoA ligation |
| | Butanoate metabolism |
| | Citrate cycle (TCA cycle) |
| | Glycosaminoglycan degradation |
| | Other enzymes |
| | Oxidative phosphorylation |
| | Pyruvate/Oxoglutarate oxidoreductases |
| | Starch and sucrose metabolism |
| | Tryptophan metabolism |

TABLE 13
Bacterial genes enriched in the gut microbiomes of obese MZ twins

| | | | | COG | KEGG |
|---|---|---|---|---|---|
| | | | | Cate- | orthologous |
| [symbol] | Genome and NCBI proteinID | Annotation | COG | gories | groups |
| 1 | Bifidobacterium_adolescentis_154486403 | tRNA-ribosyltransferase | COG0343 | J | K00773 |
| 2 | Bifidobacterium_longum_23465114 | Transcriptional regulators | COG1609 | K | |
| 3 | Bifidobacterium_longum_23466186 | ABC-type sugar transport system, | COG1653 | G | |
| | | periplasmic component | | | |
| 4 | Bifidobacterium_adolescentis_154488903 | Superfamily I DNA and RNA | COG3973 | R | |
| | | helicases | | | |
| 5 | Bifidobacterium_adolescentis_154486727 | DNA polymerase IV | COG0389 | L | K02346 |
| 6 | Bifidobacterium_adolescentis_154488882 | peptide/nickel transport system ATP- | COG1123 | R | K02031/2 |
| | | binding protein | | | |
| 7 | Bifidobacterium_adolescentis_154488633 | Trk-type K+ transport systems | COG0168 | P | |
| 8 | Bifidobacterium_adolescentis_154488131 | Asp-tRNAAsn/Glu-tRNAGln | COG0064 | J | K02434 |
| | | amidotransferase B subunit | | | |
| 9 | Bifidobacterium_adolescentis_154487571 | Threonine dehydratase | COG1171 | E | K01754 |
| 10 | Bifidobacterium_adolescentis_154486641 | Glucose-6-phosphate isomerase | COG0166 | G | K01810 |
| 11 | Bifidobacterium_adolescentis_154488790 | ATP-dependent helicase Lhr and Lhr- | COG1201 | R | K03724 |
| | | like helicase | | | |
| 12 | Bifidobacterium_adolescentis_119025482 | Predicted ATPase involved in cell | COG2884 | D | K09812 |
| | | division | | | |
| 13 | Bifidobacterium_adolescentis_154486531 | Predicted phosphohydrolases | COG1409 | R | |
| 14 | Bifidobacterium_adolescentis_154486606 | tRNA-(guanine-N1)-methyltransferase | COG0336 | J | K00554 |
| 15 | Bifidobacterium_adolescentis_154486895 | IMP dehydrogenase/GMP reductase | COG0516/7 | FR | K00088 |
| 16 | Bifidobacterium_adolescentis_154486720 | Aspartate/tyrosine/aromatic | COG0436 | E | K00812 |
| | | aminotransferase | | | |
| 17 | Bifidobacterium_adolescentis_119026599 | Cation transport ATPase | COG0474 | P | K01529 |
| 18 | Bifidobacterium_adolescentis_154486334 | hypothetical protein | | | |
| 19 | Bifidobacterium_adolescentis_119025743 | NAD/NADP transhydrogenase alpha | COG3288 | C | K00324 |
| | | subunit | | | |
| 20 | Bifidobacterium_longum_23336617 | UspA and related nucleotide-binding | COG0589 | T | |
| | | proteins | | | |
| 21 | Bifidobacterium_adolescentis_154486937 | ABC-type sugar transport system | COG1653 | G | K02027 |
| 22 | Bifidobacterium_longum_23465912 | hypothetical protein | | | |
| 23 | Bifidobacterium_longum_23335963 | K+ transporter | COG3158 | P | K03549 |
| 24 | Bifidobacterium_adolescentis_119025729 | ABC-type transport system, Fe—S | COG0719 | O | |
| | | cluster assembly | | | |
| 25 | Bifidobacterium_adolescentis_154487396 | Glutamine synthetase | COG1391 | OT | K00982 |
| | | adenylyltransferase | | | |
| 26 | Bifidobacterium_adolescentis_154488156 | hypothetical protein | | | |
| 27 | Bifidobacterium_adolescentis_154486668 | Acetyl/propionyl-CoA carboxylase | COG4770 | I | K01946 |
| 28 | Bifidobacterium_adolescentis_154487299 | Nuclease subunit of the excinuclease | COG0322 | L | K03703 |
| | | complex | | | |
| 29 | Bifidobacterium_longum_23465540 | Acetate kinase | COG0282 | C | K00925 |
| 30 | Clostridium_bartlettii_164687465 | putative conjugative transposon | NOG13238 | | |
| | | protein | | | |
| 31 | Bifidobacterium_longum_23465037 | Dipeptidase | COG4690 | E | K08659 |
| 32 | Bifidobacterium_adolescentis_154488210 | Predicted hydrolase of the metallo- | COG0595 | R | K07021 |
| | | beta-lactamase superfamily | | | |
| 33 | Bifidobacterium_adolescentis_154487598 | tRNA/rRNA methyltransferase protein | | | K00599 |
| 34 | Bifidobacterium_adolescentis_119025149 | hypothetical protein | | | |
| 35 | Bifidobacterium_adolescentis_154487052 | hypothetical protein | NOG07592 | | |
| 36 | Bifidobacterium_adolescentis_154486554 | PTS system, enzyme I | | | K00935 |
| 37 | Bifidobacterium_longum_23335005 | Selenocysteine lyase | COG0520 | E | K01763 |
| 38 | Bifidobacterium_longum_23465294 | Branched-chain amino acid | COG1114 | E | K03311 |
| | | permeases | | | |
| 39 | Bifidobacterium_adolescentis_119025432 | Acyl-CoA thioesterase | COG1946 | I | K01076 |
| 40 | Bifidobacterium_adolescentis_154486528 | Aspartate-semialdehyde | COG0136 | E | K00133 |
| | | dehydrogenase | | | |
| 41 | Bifidobacterium_adolescentis_154487076 | Predicted ATPase with chaperone | COG0606 | O | K07391 |
| | | activity | | | |
| 42 | Bifidobacterium_longum_23466221 | Alcohol dehydrogenase, class IV | COG1454 | C | K00048 |
| 43 | Bifidobacterium_adolescentis_119025541 | Phosphoribosylformylglycinamidine | COG0046/7 | F | K01952 |
| | | synthase | | | |
| 44 | Bifidobacterium_adolescentis_119026031 | Geranylgeranyl pyrophosphate | COG0142 | H | |
| | | synthase | | | |
| 45 | Bifidobacterium_longum_23465502 | Signal transduction histidine kinase | COG4585 | T | |
| 46 | Bifidobacterium_adolescentis_154486631 | Predicted metal-binding, possibly | COG1399 | R | |
| | | nucleic acid-binding protein | | | |
| 47 | Bifidobacterium_adolescentis_154488013 | Sugar (pentulose and hexulose) | COG1070 | G | K00853 |
| | | kinases | | | |
| 48 | Bifidobacterium_adolescentis_119025777 | Aspartate carbamoyltransferase | COG0540 | F | K00609 |
| 49 | Bifidobacterium_adolescentis_119025510 | Superfamily II DNA helicase | COG0514 | L | K03654 |
| 50 | Bifidobacterium_adolescentis_119026360 | Protease II | COG1770 | E | K01354 |
| 51 | Bifidobacterium_adolescentis_119025672 | Signal transduction histidine kinase | COG3920 | T | |
| 52 | Bifidobacterium_adolescentis_154487392 | Orotidine-5′-phosphate decarboxylase | COG0284 | F | K01591 |
| 53 | Bifidobacterium_adolescentis_154487114 | Permeases of the major facilitator | COG0477 | GEPR | |
| | | superfamily | | | |
| 54 | Bifidobacterium_adolescentis_119025804 | Predicted Fe—S-cluster redox enzyme | COG0820 | R | K06941 |
| 55 | Bifidobacterium_longum_23465197 | Permeases of the major facilitator | COG0477 | GEPR | |
| | | superfamily | | | |
| 56 | Bifidobacterium_adolescentis_154487064 | Superfamily II RNA helicase | COG4581 | L | K01529 |
| 57 | Bifidobacterium_longum_23465727 | ABC-type dipeptide transport system | COG0747 | E | K02035 |
| 58 | Bifidobacterium_adolescentis_154486507 | hypothetical protein | | | |
| 59 | Bifidobacterium_longum_23465472 | Predicted transcriptional regulator | COG2865 | K | |
| 60 | Bifidobacterium_adolescentis_154486695 | ABC-type phosphate transport system | COG0226 | P | K02040 |
| 61 | Bifidobacterium_longum_23466332 | Dihydroxyacid | COG0129 | EG | K01687 |
| | | dehydratase/phosphogluconate | | | |
| | | dehydratase | | | |
| 62 | Bifidobacterium_adolescentis_154489143 | Predicted | COG0637 | R | |
| | | phosphatase/phosphohexomutase | | | |
| 63 | Bifidobacterium_adolescentis_154486988 | Phosphoribosylaminoimidazole | COG0026 | F | K01589 |
| | | carboxylase | | | |
| 64 | Bifidobacterium_adolescentis_154486732 | glycoside hydrolase family 77 | COG1640 | G | K00705 |
| 65 | Bifidobacterium_adolescentis_154487590 | Uncharacterized conserved protein | COG3247 | S | |
| 66 | Bifidobacterium_adolescentis_154486669 | Acetyl-CoA carboxylase | COG4799 | I | K01966 |
| 67 | Bifidobacterium_adolescentis_154488016 | Homoserine kinase | COG0083 | E | K00872 |
| 68 | Bifidobacterium_adolescentis_119026221 | glycoside hydrolase family 43 | | | |
| 69 | Bifidobacterium_adolescentis_119025727 | CTP synthase (UTP-ammonia lyase) | COG0504 | F | K01937 |
| 70 | Bifidobacterium_adolescentis_154486325 | Uncharacterized protein conserved in | COG3583 | S | |
| | | bacteria | | | |
| 71 | Bifidobacterium_adolescentis_119025371 | Transcription elongation factor | COG0195 | K | K02600 |
| 72 | Bifidobacterium_adolescentis_154486867 | Sugar (pentulose and hexulose) | COG1070 | G | K00854 |
| | | kinases | | | |
| 73 | Bifidobacterium_adolescentis_154487511 | putative cell division protein | | | |
| 74 | Bifidobacterium_adolescentis_154487124 | hypothetical protein | | | |
| 75 | Bifidobacterium_adolescentis_119025212 | hypothetical protein | | | |
| 76 | Bifidobacterium_adolescentis_154487481 | hypothetical protein | | | |
| 77 | Bifidobacterium_adolescentis_154488824 | putative two-component sensor | | | |
| | | kinase | | | |
| 78 | Bifidobacterium_adolescentis_154488224 | serine_threonine protein kinase | | | |
| 79 | Bifidobacterium_adolescentis_154487149 | carbohydrate esterase family 1 | | | |
| 80 | Bifidobacterium_adolescentis_154488135 | rRNA methylases | COG0566 | J | K00599 |
| 81 | Bifidobacterium_adolescentis_154489172 | glycoside hydrolase family 77 | COG1640 | G | K00705 |
| 82 | Bifidobacterium_adolescentis_154487327 | Superfamily II RNA helicase | COG4581 | L | K03727 |
| 83 | Bifidobacterium_adolescentis_119025670 | Transcription elongation factor | COG0782 | K | K03624 |
| 84 | Bifidobacterium_adolescentis_154486326 | Dimethyladenosine transferase | COG0030 | J | K02528 |
| 85 | Bifidobacterium_longum_23465077 | glycosyl-transferase family 51 | COG0744 | M | K03693 |
| 86 | Bifidobacterium_longum_23464647 | hypothetical protein | NOG25707 | | |
| 87 | Bifidobacterium_adolescentis_154486363 | hypothetical protein | | | |
| 88 | Bifidobacterium_adolescentis_154486438 | Permeases of the major facilitator | COG0477 | GEPR | |
| | | superfamily | | | |
| 89 | Bifidobacterium_longum_23335686 | ABC-type antimicrobial peptide | COG0577 | V | K02004 |
| | | transport system | | | |
| 90 | Bifidobacterium_adolescentis_154486327 | 4-diphosphocytidyl-2C-methyl-D- | COG1947 | I | K00919 |
| | | erythritol 2-phosphate synthase | | | |
| 91 | Bifidobacterium_adolescentis_154488959 | twitching motility protein PilT | | | K02669 |
| 92 | Bifidobacterium_adolescentis_154486273 | Leucyl-tRNA synthetase | COG0495 | J | K01869 |
| 93 | Bifidobacterium_adolescentis_154486329 | tRNA nucleotidyltransferase/poly(A) | COG0617 | J | K00970 |
| | | polymerase | | | |
| 94 | Bifidobacterium_adolescentis_154487191 | putative phage protein | | | |
| 95 | Bifidobacterium_adolescentis_154486270 | DNA polymerase III, delta subunit | COG1466 | L | K02340 |
| 96 | Bifidobacterium_adolescentis_154486380 | hypothetical protein | | | |
| 97 | Anaerostipes_caccae_167747544 | Non-ribosomal peptide synthetase | COG1020 | Q | |
| | | modules and related proteins | | | |
| 98 | Bifidobacterium_adolescentis_154486501 | Predicted unusual protein kinase | COG0661 | R | |
| 99 | Bifidobacterium_adolescentis_154486855 | LacI-family transcriptional regulator | | | |
| 100 | Bifidobacterium_adolescentis_154486358 | Hemolysins and related proteins | COG1253 | R | K03699 |
| 101 | Bifidobacterium_adolescentis_154486649 | Acetylornithine deacetylase/Succinyl- | COG0624 | E | K01439 |
| | | diaminopimelate desuccinylase | | | |
| 102 | Bifidobacterium_adolescentis_119025555 | Orotidine-5′-phosphate decarboxylase | COG0284 | F | K01591 |
| 103 | Bifidobacterium_longum_23465600 | Gamma-glutamyl phosphate | COG0014 | E | K00147 |
| | | reductase | | | |
| 104 | Bifidobacterium_adolescentis_154486786 | FAD synthase/riboflavin kinase/FMN | COG0196 | H | K00861/0953 |
| | | adenylyltransferase | | | |
| 105 | Bifidobacterium_adolescentis_154488712 | Ribonuclease D | COG0349 | J | K03684 |
| 106 | Bifidobacterium_adolescentis_154488649 | N-acetylglutamate synthase (N- | COG1364 | E | K00620/0642 |
| | | acetylornithine aminotransferase) | | | |
| 107 | Bifidobacterium_adolescentis_154489082 | Ribonucleoside-triphosphate | COG1328 | F | K00527 |
| | | reductase | | | |
| 108 | Bifidobacterium_adolescentis_154487141 | transcriptional regulator, AraC family | | | |
| 109 | Bifidobacterium_longum_23335562 | Acetyltransferase (isoleucine patch | COG0110 | R | K00680 |
| | | superfamily) | | | |
| 110 | Bifidobacterium_adolescentis_119025600 | ABC-type amino acid transport | COG0765 | E | |
| | | system, permease component | | | |
| 111 | Bifidobacterium_adolescentis_154486349 | Recombinational DNA repair ATPase | COG1195 | L | K03629 |
| | | (RecF pathway) | | | |
| 112 | Bifidobacterium_adolescentis_154487341 | Succinyl-CoA synthetase | COG0045 | C | K01903 |
| 113 | Bifidobacterium_adolescentis_154486419 | Adenylosuccinate synthase | COG0104 | F | K01939 |
| 114 | Bifidobacterium_adolescentis_154486323 | transcriptional regulator, AraC family | | | |
| 115 | Bifidobacterium_adolescentis_119025197 | 3-isopropylmalate dehydratase large | COG0065 | E | K01702/3 |
| | | subunit | | | |
| 116 | Bifidobacterium_adolescentis_154489094 | Predicted dehydrogenases and | COG0673 | R | |
| | | related proteins | | | |
| 117 | Bifidobacterium_longum_23336262 | O-acetylhomoserine sulfhydrylase | COG2873 | E | K01740 |
| 118 | Bifidobacterium_longum_23465907 | ABC-type | COG0601 | EP | K02033 |
| | | dipeptide/oligopeptide/nickel transport | | | |
| | | systems | | | |
| 119 | Bifidobacterium_adolescentis_154487000 | Threonine aldolase | COG2008 | E | K01620 |
| 120 | Bifidobacterium_adolescentis_154487167 | Sortase and related acyltransferases | COG1247 | M | K03823 |
| 121 | Bifidobacterium_longum_23465198 | Thioredoxin reductase | COG0492/05 | OC | K00384 |
| | | | 26 | | |
| 122 | Bifidobacterium_adolescentis_154488926 | Arabinose efflux permease | COG2814 | G | |
| 123 | Bifidobacterium_longum_23465931 | ABC-type antimicrobial peptide | COG1136 | V | K02003/4 |
| | | transport system, ATPase component | | | |
| 124 | Bifidobacterium_adolescentis_154486352 | Type IIA topoisomerase (DNA | COG0188 | L | K01863/2469 |
| | | gyrase/topo II, topoisomerase IV) | | | |
| 125 | Bifidobacterium_adolescentis_119026009 | Pyruvate-formate lyase-activating | COG1180 | O | K04069 |
| | | enzyme | | | |
| 126 | Bifidobacterium_adolescentis_154487279 | Methionine synthase II (cobalamin- | COG0620 | E | K00549 |
| | | independent) | | | |
| 127 | Bifidobacterium_adolescentis_119025238 | Acetolactate synthase | COG0440 | E | K01653 |
| 128 | Bifidobacterium_adolescentis_119025129 | Signal recognition particle GTPase | COG0552 | U | K03110 |
| 129 | Bifidobacterium_adolescentis_154488132 | Asp-tRNAAsn/Glu-tRNAGln | COG0154 | J | K02433 |
| | | amidotransferase | | | |
| 130 | Bifidobacterium_adolescentis_154486940 | ABC-type dipeptide transport system | COG0747 | E | K02035 |
| 131 | Bifidobacterium_adolescentis_154488789 | Type IIA topoisomerase (DNA | COG0188 | L | K01863/2469 |
| | | gyrase/topo II, topoisomerase IV) | | | |
| 132 | Bifidobacterium_adolescentis_154487377 | Long-chain acyl-CoA synthetases | COG1022 | I | K01897 |
| 133 | Bifidobacterium_adolescentis_154488794 | DNA-directed RNA polymerase, | COG0568 | K | K03086 |
| | | sigma subunit | | | |
| 134 | Bifidobacterium_adolescentis_154488989 | Superfamily I DNA and RNA | COG0210 | L | K01529 |
| | | helicases | | | |
| 135 | Bifidobacterium_adolescentis_154486903 | Prolyl-tRNA synthetase | COG0442 | J | K01881 |
| 136 | Bifidobacterium_adolescentis_154488684 | putative helicase | | | |
| 137 | Bifidobacterium_adolescentis_154486399 | Lysophospholipase | COG2267 | I | |
| 138 | Bifidobacterium_adolescentis_119026611 | ABC-type sugar transport systems, | COG3839 | G | K05816 |
| | | ATPase components | | | |
| 139 | Bifidobacterium_adolescentis_154486670 | Putative fatty acid synthase/reductase | COG0304/03 | IQ | K00059/209/ |
| | | | 31/2030/4981/ | | 665/666/680 |
| | | | 4982 | | |
| 140 | Bifidobacterium_adolescentis_154488852 | ABC-type oligopeptide transport | COG4166 | E | K02035 |
| | | system | | | |
| 141 | Bifidobacterium_adolescentis_154486664 | putative ABC-type sugar transport | | | |
| | | system | | | |
| 142 | Bifidobacterium_adolescentis_119025257 | Ribonucleases G and E | COG1530 | J | K01128 |
| 143 | Bifidobacterium_adolescentis_154486472 | ABC-type antimicrobial peptide | COG0577 | V | K02004 |
| | | transport system | | | |
| 144 | Bifidobacterium_adolescentis_154487036 | hypothetical protein | | | |
| 145 | Bifidobacterium_adolescentis_154487636 | glycoside hydrolase family 2 | COG3250 | G | K01190 |
| 146 | Eubacterium_dolichum_160915695 | glycoside hydrolase family 31 | | | |
| 147 | Bifidobacterium_adolescentis_154489092 | Aspartate/tyrosine/aromatic | COG0436 | E | K00812 |
| | | aminotransferase | | | |
| 148 | Bifidobacterium_adolescentis_119026440 | hypothetical protein | NOG21350 | | |
| 149 | Bifidobacterium_adolescentis_119025397 | Myosin-crossreactive antigen | COG4716 | S | |
| 150 | Bifidobacterium_adolescentis_119026143 | Glutamine amidotransferase | COG0118 | E | K02501 |
| 151 | Bifidobacterium_adolescentis_154487050 | Universal stress protein UspA | COG0589 | T | |
| 152 | Bifidobacterium_adolescentis_154486729 | Phosphoglycerate dehydrogenase | COG0111 | HE | |
| 153 | Bifidobacterium_adolescentis_154488261 | Predicted hydrolases or | COG0596 | R | |
| | | acyltransferases | | | |
| 154 | Bifidobacterium_adolescentis_154489101 | hypothetical protein | | | |
| 155 | Bifidobacterium_adolescentis_154487476 | Phosphotransacetylase | COG0280/08 | CR | K00625 |
| | | | 57 | | |
| 156 | Bifidobacterium_adolescentis_154488788 | Uncharacterized proteins of the AP | COG1524 | R | |
| | | superfamily | | | |
| 157 | Ruminococcus_obeum_153809835 | putative ketose-bisphosphate | | | |
| | | aldolase | | | |
| 158 | Clostridium_leptum_160933115 | hypothetical protein | | | |
| 159 | Bifidobacterium_adolescentis_119026429 | Ribulose-5-phosphate 4-epimerase | COG0235 | G | K03080 |
| 160 | Bifidobacterium_adolescentis_154487579 | glycoside hydrolase family 36 | COG3345 | G | K07407 |
| 161 | Bifidobacterium_longum_23464678 | hypothetical protein | | | |
| 162 | Bifidobacterium_adolescentis_154486391 | Serine/threonine protein phosphatase | COG0631 | T | K01090 |
| 163 | Bifidobacterium_adolescentis_154486962 | ABC-type amino acid transport/signal | COG0834 | ET | K02030 |
| | | transduction systems | | | |
| 164 | Bifidobacterium_adolescentis_154486954 | DNA primase | COG0358 | L | K02316 |
| 165 | Bifidobacterium_adolescentis_154486993 | Glutamine | COG0034 | F | K00764 |
| | | phosphoribosylpyrophosphate | | | |
| | | amidotransferase | | | |
| 166 | Bifidobacterium_adolescentis_154488913 | HrpA-like helicases | COG1643 | L | K03578 |
| 167 | Bifidobacterium_adolescentis_154486787 | Predicted ATP-dependent serine | COG1066 | O | K04485 |
| | | protease | | | |
| 168 | Bifidobacterium_adolescentis_154486493 | Ammonia permease | COG0004 | P | K03320 |
| 169 | Bifidobacterium_adolescentis_154487494 | Methenyl tetrahydrofolate | COG0190 | H | K00288/1491 |
| | | cyclohydrolase | | | |
| 170 | Bifidobacterium_adolescentis_119025196 | Transcriptional regulator | COG1414 | K | |
| 171 | Dorea_longicatena_153853202 | hypothetical protein | | | |
| 172 | Bifidobacterium_adolescentis_154487329 | putative transcriptional regulator | | | |
| 173 | Bifidobacterium_adolescentis_154487591 | LacI-family transcriptional regulator | | | |
| 174 | Bifidobacterium_adolescentis_154486321 | glycoside hydrolase family 3 | | | |
| 175 | Bifidobacterium_adolescentis_119025741 | GTPase | COG1159 | R | K03595 |
| 176 | Clostridium_scindens_167758922 | dUTPase | COG0756 | F | K01520 |
| 177 | Bifidobacterium_adolescentis_119025587 | Signal transduction histidine kinase | COG0642 | T | |
| 178 | Bifidobacterium_adolescentis_154486470 | Predicted membrane protein | COG4393 | S | |
| 179 | Clostridium_scindens_167760262 | putative sporulation protein | | | |
| 180 | Bacteroides_stercoris_167763769 | hypothetical protein | | | |
| 181 | Anaerostipes_caccae_167746872 | putative ABC transporter | | | |
| 182 | Bifidobacterium_adolescentis_154486920 | ABC-type amino acid transport/signal | COG0834 | ET | K02030 |
| | | transduction systems | | | |
| 183 | Bifidobacterium_adolescentis_154487063 | Uncharacterized conserved protein | COG2326 | S | |
| 184 | Bifidobacterium_adolescentis_119025989 | glycoside hydrolase family 13 | COG0366 | G | K01187 |
| 185 | Clostridium_bartlettii_164687864 | Lactoylglutathione lyase | COG0346 | E | K01759 |
| 186 | Bifidobacterium_adolescentis_154486443 | ABC-type antimicrobial peptide | COG0577 | V | K02004 |
| | | transport system | | | |
| 187 | Bifidobacterium_adolescentis_154488245 | NADH:flavin | COG1902 | C | K00354 |
| | | oxidoreductases/NADPH2 | | | |
| | | dehydrogenase | | | |
| 188 | Bifidobacterium_longum_23465963 | atypical histidine kinase sensor of | NOG21560 | | |
| | | two-component system | | | |
| 189 | Bifidobacterium_adolescentis_154488949 | hypothetical protein | | | |
| 190 | Bifidobacterium_adolescentis_154486865 | maltose O-acetyltransferase | | | |
| 191 | Clostridium_scindens_167759009 | cytidylate kinase | | | K00945 |
| 192 | Bifidobacterium_adolescentis_154486901 | ATP-dependent exoDNAse | COG0507 | L | |
| 193 | Ruminococcus_torques_153814251 | hypothetical protein | | | |
| 194 | Bifidobacterium_adolescentis_119025327 | Ribosomal protein L13 | COG0102 | J | K02871 |
| 195 | Bifidobacterium_adolescentis_154488916 | ABC-type antimicrobial peptide | COG1136 | V | |
| | | transport system | | | |
| 196 | Bifidobacterium_adolescentis_119025389 | putative histidine kinase sensor of two | | | |
| | | component system | | | |
| 197 | Ruminococcus_gnavus_154504598 | Translation elongation factor P (EF- | COG0231 | J | K02356 |
| | | P)/initiation factor 5A (eIF-5A) | | | |
| 198 | Bifidobacterium_adolescentis_119026648 | ribonuclease P | NOG21633 | | K03536 |
| 199 | Clostridium_scindens_167760715 | hypothetical protein | | | |
| 200 | Bifidobacterium_adolescentis_119026098 | Uncharacterized conserved protein | COG2606 | S | |
| 201 | Clostridium_scindens_167761320 | ABC-type antimicrobial peptide | COG1136 | V | K02003 |
| | | transport system | | | |
| 202 | Bacteroides_stercoris_167762249 | hypothetical protein | | | |
| 203 | Anaerostipes_caccae_167746530 | putative ion channel | | | |
| 204 | Bifidobacterium_adolescentis_119025057 | Serine/threonine protein kinase | COG0515 | RTKL | |
| 205 | Clostridium_bartlettii_164686672 | Molybdopterin biosynthesis enzymes | COG0521 | H | K03638 |
| 206 | Ruminococcus_obeum_153811887 | hypothetical protein | | | |
| 207 | Clostridium_spiroforme_169349879 | protein-Np-phosphohistidine-sugar | | | K00890 |
| | | phosphotransferase | | | |
| 208 | Clostridium_ramosum_167756439 | type I restriction enzyme, S subunit | | | K01154 |
| 209 | Bifidobacterium_adolescentis_119025640 | Short-chain alcohol dehydrogenase of | COG4221 | R | |
| | | unknown specificity | | | |
| 210 | Eubacterium_ventriosum_154483925 | Uncharacterized conserved protein | COG2501 | S | |
| 211 | Bifidobacterium_adolescentis_154487477 | Phosphoketolase | COG3957 | G | K01621/32/36 |
| 212 | Bifidobacterium_adolescentis_154489149 | Putative molecular chaperone | COG0443 | O | K01529/4043/ |
| | | | | | 8070 |
| 213 | Bifidobacterium_adolescentis_119025585 | hypothetical protein | | | |
| 214 | Clostridium_scindens_167759334 | ABC-type antimicrobial peptide | COG1136 | V | K02003 |
| | | transport system | | | |
| 215 | Anaerostipes_caccae_167748732 | Serine-pyruvate | COG0075 | E | K03430 |
| | | aminotransferase/archaeal aspartate | | | |
| | | aminotransferase | | | |
| 216 | Ruminococcus_gnavus_154505702 | Putative phage replication protein | COG2946 | L | K07467 |
| | | RstA | | | |
| 217 | Bifidobacterium_adolescentis_154486389 | Cell division protein FtsI | COG0768 | M | |
| 218 | Bifidobacterium_adolescentis_154488668 | ABC-type cobalt transport system | COG1122 | P | K02006 |
| 219 | Bifidobacterium_adolescentis_154486277 | Fructose-2,6- | COG0406 | G | K01834 |
| | | bisphosphatase/phosphoglycerate | | | |
| | | mutase | | | |
| 220 | Clostridium_scindens_167758556 | hypothetical protein | | | |
| 221 | Dorea_longicatena_153855715 | putative acetyltransferase | | | |
| 222 | Eubacterium_dolichum_160915136 | ABC-type antimicrobial peptide | COG1136 | V | K02003 |
| | | transport system | | | |
| 223 | Bifidobacterium_adolescentis_119026205 | Isoleucyl-tRNA synthetase | COG0060 | J | K01870 |
| 224 | Ruminococcus_obeum_153810514 | glycoside hydrolase family 23 | COG0741/91 | M | |
| 225 | Eubacterium_eligens_Contig2011.538 | putative phosphohydrolase | | | |
| 226 | Bifidobacterium_adolescentis_154487387 | Transcriptional regulator | COG0583 | K | |
| 227 | Ruminococcus_obeum_153812199 | putative flavodoxin | | | |
| 228 | Bifidobacterium_adolescentis_154486996 | Phosphoribosylformylglycinamidine | COG0046/7 | F | K01952 |
| | | (FGAM) synthase | | | |
| 229 | Dorea_longicatena_153854194 | Ornithine/acetylornithine | COG4992 | E | K00818 |
| | | aminotransferase | | | |
| 230 | Ruminococcus_gnavus_154505209 | Predicted GTPases | COG1160 | R | |
| 231 | Dorea_longicatena_153853531 | Predicted transcriptional regulators | COG1695 | K | |
| 232 | Ruminococcus_torques_153814203 | Acetyltransferases | COG0456 | R | K03826 |
| 233 | Clostridium_scindens_167761371 | putative ABC-type transport system | | | |
| 234 | Bifidobacterium_longum_38906105 | F0F1-type ATP synthase | COG0055 | C | K02112 |
| 235 | Collinsella_aerofaciens_139439837 | hypothetical protein | | | |
| 236 | Clostridium_leptum_160933570 | ABC-type antimicrobial peptide | COG0577/11 | V | K02003 |
| | | transport system | 36 | | |
| 237 | Eubacterium_rectale_2731 | putative sensor histidine kinase | | | |
| 238 | Bifidobacterium_adolescentis_154489126 | ABC-type multidrug transport system | COG1132 | V | K06147 |
| 239 | Ruminococcus_obeum_153812105 | putative conjugative transposon | NOG05968 | | |
| | | protein | | | |
| 240 | Dorea_longicatena_153853999 | hypothetical protein | | | |
| 241 | Clostridium_bolteae_160937390 | hypothetical protein | | | |
| 242 | Ruminococcus_torques_153814809 | cytidylate kinase | | | K00945 |
| 243 | Ruminococcus_obeum_153810530 | hypothetical protein | | | |
| 244 | Clostridium_scindens_167758273 | putative alanine racemase | | | |
| 245 | Clostridium_scindens_167760222 | putative ABC transporter | | | |
| 246 | Dorea_longicatena_153854759 | Sporulation protein | COG2088 | M | K06412 |
| 247 | Bifidobacterium_adolescentis_119025414 | glycosyl-transferase family 4 | | | |
| 248 | Ruminococcus_obeum_153813075 | hypothetical protein | | | |
| 249 | Eubacterium_ventriosum_154482695 | Queuine/archaeosine tRNA- | COG0343 | J | K00773 |
| | | ribosyltransferase | | | |
| 250 | Ruminococcus_obeum_153811892 | hypothetical protein | | | |
| 251 | Ruminococcus_obeum_153810246 | Type IV secretory pathway, VirB4 | COG3451 | U | |
| | | components | | | |
| 252 | Dorea_longicatena_153854838 | Ribosomal protein S16 | COG0228 | J | K02959 |
| 253 | Dorea_longicatena_153855241 | putative DNA gyrase, subunit A | | | |
| 254 | Collinsella_aerofaciens_139438412 | putative transcriptional regulator | | | |
| 255 | Clostridium_leptum_160934853 | putative ribosomal-protein-alanine | | | |
| | | acetyltransferase | | | |
| 256 | Eubacterium_rectale_3602 | Type IV secretory pathway, VirD4 | COG3505 | U | |
| | | components | | | |
| 257 | Bifidobacterium_adolescentis_154486460 | ABC-type multidrug transport system | COG1132 | V | K06147 |
| 258 | Anaerostipes_caccae_167746203 | exonuclease SbcC | | | K03546 |
| 259 | Ruminococcus_obeum_153813732 | hypothetical protein | | | |
| 260 | Eubacterium_ventriosum_154484729 | protein-Np-phosphohistidine-sugar | | | K00890 |
| | | phosphotransferase | | | |
| 261 | Eubacterium_rectale_3363 | putative ABC transporter | | | |
| 262 | Ruminococcus_obeum_153809913 | hypothetical protein | | | |
| 263 | Anaerostipes_caccae_167748861 | putative arylsulfate sulfotransferase | | | |
| 264 | Eubacterium_eligens_Contig2011.154 | Uncharacterized conserved protein | COG4283 | S | |
| 265 | Clostridium_scindens_167759418 | putative competence protein ComEA | | | |
| 266 | Eubacterium_rectale_3439 | putative RNA-directed DNA | | | |
| | | polymerase | | | |
| 267 | Clostridium_bolteae_160940954 | SAM-dependent methyltransferases | COG0500 | QR | K00599 |
| 268 | Ruminococcus_obeum_153811726 | putative DNA topoisomerase | | | |
| 269 | Ruminococcus_obeum_153813044 | putative transposase | | | |
| 270 | Eubacterium_rectale_2410 | type I restriction enzyme, R subunit | | | K01152/3 |
| 271 | Clostridium_bolteae_160941795 | putative recombination protein | | | |
| 272 | Bifidobacterium_adolescentis_154486724 | putative esterase | | | |
| 273 | Collinsella_aerofaciens_139438485 | putative amidohydrolase | | | |

[symbol]

indicates data missing or illegible when filed

TABLE 14
Bacterial genes enriched in gut microbiomes of lean MZ twins

| | | | | COG | KEGG |
|---|---|---|---|---|---|
| | | | | Cate- | orthologous |
| [symbol] | Genome and NCBI proteinID | Annotation | COG | gories | groups |
| 274 | Bacteroides_capillosus_154500567 | putative amidohydrolase | | | |
| 275 | Clostridium_leptum_160934848 | putative acetyltransferase | | | |
| 276 | Ruminococcus_obeum_153810033 | phosphocarrier protein HPr | | | K02784 |
| 277 | Eubacterium_siraeum_167749283 | putative ABC transporter related | | | |
| | | protein | | | |
| 278 | Bacteroides_capillosus_154497054 | Polyribonucleotide | COG1185 | J | K00962 |
| | | nucleotidyltransferase | | | |
| 279 | Eubacterium_siraeum_167749675 | Isoleucyl-tRNA synthetase | COG0060 | J | K01870 |
| 280 | Eubacterium_rectale_3617 | hypothetical protein | | | |
| 281 | Bacteroides_capillosus_154498345 | putative sporulation protein | | | |
| 282 | Parabacteroides_merdae_154490921 | hypothetical protein | | | |
| 283 | Bacteroides_capillosus_154500960 | putative chromosome segregation | | | |
| | | protein | | | |
| 284 | Ruminococcus_torques_153814925 | putative sporulation protein | | | |
| 285 | Clostridium_scindens_167758815 | glycosyl-transferase family 4 | | | |
| 286 | Clostridium_sp._L2_50_160893842 | Protease subunit of ATP-dependent | COG0740 | OU | K01358 |
| | | Clp proteases | | | |
| 287 | B_theta_WH2_000545 | putative type I restriction enzyme | | | |
| | | EcoAI specificity protein | | | |
| 288 | Bacteroides_capillosus_154500843 | trk system potassium uptake protein | | | K03499 |
| | | TrkA | | | |
| 289 | Clostridium_bolteae_160936948 | putative two-component | | | |
| | | transcriptional regulator | | | |
| 290 | Bacteroides_capillosus_154498005 | ATP-dependent serine | COG1066 | O | K00567 |
| | | protease/cysteine S- | | | |
| | | methyltransferase | | | |
| 291 | Parabacteroides_merdae_154492394 | hypothetical protein | | | |
| 292 | Bacteroides_capillosus_154498009 | Fructose/tagatose bisphosphate | COG0191 | G | K01622 |
| | | aldolase | | | |
| 293 | B_theta_3731_000845 | hypothetical protein | | | |
| 294 | Anaerotruncus_colihominis_167769594 | Predicted ATPase (AAA+ | COG1373 | R | |
| | | superfamily) | | | |
| 295 | Bacteroides_capillosus_154500228 | putative translation protein | | | |
| 296 | Anaerofustis_stercorihominis_169334667 | putative DNA recombinase | | | |
| 297 | B_theta_3731_003400 | hypothetical protein | | | |
| 298 | Parabacteroides_distasonis_150008749 | hypothetical protein | | | |
| 299 | Bacteroides_fragilis_19068109 | mobilization protein BmgA | NOG11714 | | |
| 300 | Eubacterium_dolichum_160914154 | glycoside hydrolase family 20 | COG3525 | G | K01207 |
| 301 | Bacteroides_capillosus_154497125 | RNA methyltransferase, TrmH family | | | K03218 |
| 302 | Clostridium_sp._L2_50_160894658 | NTP pyrophosphohydrolases | COG0494/33 | LRS | K03574 |
| | | | 23 | | |
| 303 | Parabacteroides_merdae_154494925 | Glyceraldehyde-3-phosphate | COG0057 | G | K00134 |
| | | dehydrogenase | | | |
| 304 | Bacteroides_capillosus_154496139 | Type IIA topoisomerase (DNA | COG0188 | L | K01863/2469 |
| | | gyrase/topo II, topoisomerase IV) | | | |
| 305 | Clostridium_ramosum_167755346 | MoxR-like ATPase | | | K03924 |
| 306 | Bacteroides_uniformis_160888848 | hypothetical protein | | | |
| 307 | Ruminococcus_gnavus_154504651 | Putative translation initiation inhibitor | COG0251 | J | K07567 |
| 308 | Bacteroides_uniformis_160890270 | putative phage protein | | | |
| 309 | Bacteroides_capillosus_154500164 | putative DNA recombinase | | | |
| 310 | B_theta_WH2_000807 | sulfotransferase/FAD synthetase | COG0175 | EH | K00957 |
| 311 | Bacteroides_uniformis_160892052 | carbohydrate esterase family 4 and | | | |
| | | 12 | | | |
| 312 | Clostridium_sp._L2_50_160893671 | hypothetical protein | | | |
| 313 | Bacteroides_capillosus_154500952 | hypothetical protein | | | K09710 |
| 314 | Clostridium_scindens_167759293 | putative ribonucleoside-triphosphate | | | |
| | | reductase activating protein | | | |
| 315 | Bacteroides_capillosus_154498134 | Predicted GTPases | COG1160 | R | K03977 |
| 316 | Bacteroides_capillosus_154500412 | ribosomal protein | | | |
| 317 | Bacteroides_fragilis_60683403 | Imidazolonepropionase and related | COG1228 | Q | K01468 |
| | | amidohydrolases | | | |
| 318 | Peptostreptococcus_micros_160946111 | hypothetical protein | NOG15344 | | |
| 319 | B_theta_7330_001524 | putative transposase | | | |
| 320 | Bacteroides_capillosus_154500229 | putative peptidase | | | |
| 321 | Bacteroides_vulgatus_150006208 | Integrase | COG0582 | L | |
| 322 | Bacteroides_capillosus_154501540 | hypothetical protein | | | |
| 323 | Bacteroides_stercoris_167762500 | Site-specific recombinase XerD | COG4974 | L | |
| 324 | Bacteroides_fragilis_60679880 | glycoside hydrolase family 38 | COG0383 | G | K01191 |
| 325 | Bacteroides_capillosus_154497979 | putative replication protein | | | |
| 326 | Bacteroides_capillosus_154500160 | putative helicase | | | |
| 327 | Bacteroides_stercoris_167752230 | Retron-type reverse transcriptase | COG3344 | L | |
| 328 | B_theta_WH2_003792 | hypothetical protein | NOG14996 | | |
| 329 | Bacteroides_capillosus_154497731 | hypothetical protein | | | |
| 330 | Parabacteroides_merdae_154494117 | UDP-N-acetyl-D-mannosaminuronate | COG0677 | M | K02472 |
| | | dehydrogenase | | | |
| 331 | Bacteroides_caccae_153807847 | 2-succinyl-6-hydroxy-2,4- | COG1165 | H | K02551 |
| | | cyclohexadiene-1-carboxylate | | | |
| | | synthase | | | |
| 332 | Anaerotruncus_colihominis_167771309 | N-acetylglutamate synthase (N- | COG1364 | E | K00618 |
| | | acetylornithine aminotransferase) | | | |
| 333 | B_theta_WH2_003808 | putative outer membrane protein | | | |
| 334 | Eubacterium_dolichum_160914195 | putative copper-translocating P-type | | | K01529 |
| | | ATPase | | | |
| 335 | Bacteroides_fragilis_53715551 | Predicted ATPase | COG1373 | R | |
| 336 | Clostridium_bolteae_160937654 | putative phage protein | | | |
| 337 | Bacteroides_fragilis_53712550 | Alkyl hydroperoxide reductase | COG3634 | O | K03387 |
| 338 | Parabacteroides_merdae_154492101 | hypothetical protein | | | |
| 339 | Clostridium_bolteae_160936352 | Uncharacterized conserved protein | COG2606 | S | |
| 340 | Bacteroides_uniformis_160889340 | TraM | | | |
| 341 | B_theta_7330_002089 | Adenine-specific DNA methylase | COG0827/46 | KL | |
| | | | 46 | | |
| 342 | B_theta_WH2_003982 | putative outer membrane protein | | | |
| 343 | Bacteroides_capillosus_154496743 | hypothetical protein | | | |
| 344 | Clostridium_bolteae_160941240 | putative citrate lyase | | | |
| 345 | Bacteroides_capillosus_154496327 | putative v-type ATPase | | | |
| 346 | Bacteroides_capillosus_154496839 | putative cobalamin biosynthesis | | | |
| | | protein | | | |
| 347 | Bacteroides_fragilis_60683742 | Small-conductance mechanosensitive | COG0668 | M | |
| | | channel | | | |
| 348 | Eubacterium_siraeum_167749611 | putative transcriptional regulator | | | |
| 349 | Parabacteroides_distasonis_150007998 | Cobyric acid synthase | COG1492 | H | K02232 |
| 350 | Parabacteroides_distasonis_150008480 | putative pyruvate formate-lyase 3 | | | |
| | | activating enzyme | | | |
| 351 | Bacteroides_capillosus_154496329 | Na+-transporting two-sector | | | K01549/50 |
| | | ATPase/ATP synthase | | | |
| 352 | Bacteroides_capillosus_154496850 | hypothetical protein | | | |
| 353 | Bacteroides_capillosus_154496749 | putative spore maturation protein | | | |
| 354 | Bacteroides_capillosus_154496148 | putative spore protease | | | |
| 355 | Clostridium_bolteae_160937655 | DNA polymerase | | | K00961 |
| 356 | Bacteroides_fragilis_60683107 | Putative copper/silver efflux pump | COG3696 | P | K07239/7787 |
| 357 | Bacteroides_capillosus_154496295 | putative short-chain | | | |
| | | dehydrogenase/reductase | | | |
| 358 | Anaerotruncus_colihominis_167771023 | stage V sporulation protein AC | | | K06405 |
| 359 | B_theta_WH2_004992 | ABC-type multidrug transport system | COG0842 | V | K09686 |
| 360 | Bacteroides_capillosus_154500409 | Transcription antiterminator | COG0250 | K | K02601 |
| 361 | B_theta_3731_003445 | putative tyrosine type site-specific | NOG36763 | | |
| | | recombinase | | | |
| 362 | B_theta_WH2_003671 | putative 3-oxoacyl-[acyl-carrier- | | | |
| | | protein] synthase | | | |
| 363 | Parabacteroides_distasonis_150010457 | hypothetical protein | | | |
| 364 | Bacteroides_fragilis_60681723 | putative hydrolase lipoprotein | NOG09493 | | |
| 365 | Clostridium_scindens_167758928 | putative transcriptional regulator | | | |
| 366 | Bacteroides_capillosus_154498046 | Exonuclease VII small subunit | COG1722 | L | K03602 |
| 367 | Ruminococcus_gnavus_154504691 | putative phage protein | | | |
| 368 | Anaerotruncus_colihominis_167772969 | hypothetical protein | | | |
| 369 | Bacteroides_caccae_153808785 | Predicted nucleoside-diphosphate | COG1086 | MG | |
| | | sugar epimerases | | | |
| 370 | Alistipes_putredinis_167751920 | phosphoglycolate phosphatase | | | K01091 |
| 371 | Anaerotruncus_colihominis_167772790 | hypothetical protein | | | |
| 372 | Parabacteroides_merdae_154494124 | putative transcriptional regulator | | | |
| 373 | Bacteroides_caccae_153809523 | glycoside hydrolase family 29 | COG3669 | G | K01206 |
| 374 | Bacteroides_fragilis_46242778 | TraO conjugation protein | | | |
| 375 | Bacteroides_capillosus_154499075 | putative site-specific recombinase | | | |
| 376 | Anaerotruncus_colihominis_163816273 | putative DNA helicase | | | |
| 377 | Bacteroides_capillosus_154495881 | Pentose-5-phosphate-3-epimerase | COG0036 | G | K01783 |
| 378 | Bacteroides_uniformis_160887913 | hypothetical protein | | | |
| 379 | Dorea_longicatena_153853397 | putative phage protein | | | |
| 380 | Bacteroides_vulgatus_150003721 | putative outer membrane protein | | | |
| 381 | B_theta_WH2_002145 | putative outer membrane protein | | | |
| 382 | Bacteroides_capillosus_154500525 | hypothetical protein | | | Lean- |
| 383 | Alistipes_putredinis_167752229 | putative DNA primase | NOG22337 | | |

[symbol]

indicates data missing or illegible when filed

### Example 8

### BMI Categorization by Ethnicity in Participants in Missouri Adolescent Female Twin Study

[0176] BMI category by ethnicity for the entire MOAFTS wave 5 cohort, based on 3326 twins with complete data on height and weight is summarized in Table 15. Dizygotic (DZ) twins had a significantly higher mean BMI than monozygotic (MZ) twins [25.8±6.5 vs. 24.8±5.9, p<0.001, mean±sd], and a higher prevalence of overweight (22.8 vs 20.9%) and obese (20.7 vs 16.1%; χ2=31.6, p<0.001). This may reflect a higher dizygotic twinning rate among obese women (MZ twinning occurs randomly39). BMI was more highly correlated in MZ twins than in DZ twins, both in EA pairs (rMZ=0.80, rDZ=0.48) and in AA pairs (rMZ=0.73, rDZ=0.26), and this remained true when analysis was restricted to pairs concordant for obesity (EA: rMZ=0.61, rDZ=0.27; AA rMZ=0.62, rDZ=−0.11) or concordant for leanness (EA: rMZ=0.43, rDZ=0.14; AA: rMZ=0.55, rDZ=0.39). After age-adjustment, quantitative genetic modeling yielded an estimated additive genetic variance for BMI of 68% (95% Confidence Interval [CI]: 57-79%), shared environmental variance of 14% (95% CI: 2-24%), and non-shared environmental variance of 14% (95% CI: 17-21%). Data from the Behavioral Risk Factor Surveillance System for Missouri women of comparable age in 2006 yield higher rates of overweight and obesity in EA women (23.8% overweight and 25% obese) compared to rates observed in MOAFTS (19.6% overweight EA, 14.8% obese EA).

TABLE 15
BMI category in the Missouri Adolescent Female Twin Study^{a}

| | | | | | Obese | Obese |
|---|---|---|---|---|---|---|
| | Underweight | Lean | Overweight | Obese I | II | III |
| | (n = 138) | (n = 1893) | (n = 711) | (n = 309) | (n = 174) | (n = 113) |
| EA | 4.79 | 60.87 | 19.58 | 8.08 | 4.27 | 2.41 |
| (n = 2860) | | | | | | |
| AA | 0.21 | 31.80 | 31.59 | 16.32 | 10.88 | 9.21 |
| (n = 478) | | | | | | |

^{a}All numbers are percentages. Underwight:,18.5 kg/m²; Lean 18.5-24.9 kg/m² 25-29.9 kg/m²; Obese I: 30-34..9 kg/m²; Obese II: 35-39.9 kg/m²; Obese III: ≧40 kg/m²

[0177] Lean and obese women selected for inclusion in the biospecimen collection project were representative of the entire cohort of lean and obese MOAFTS twins in terms of parity (nulliparous/parous), educational attainment (more than high school education/high school education or less) and marital status (married or living with someone as married/not married; p>0.05 for all comparisons). Obese EA women providing biospecimens had a mean BMI at wave 5 of 36.9±4.7 compared with a mean among EA lean women of 21.4±1.5 (mean±sd). EA twins were selected as being stably lean across all waves of data collection (i.e., baseline at median age 15, one-year follow-up, 5-year follow-up and 7-year follow-up), with a self-reported BMI of 18.5-24.9 kg/m².

### Example 9

### Comparison of Amplification Methods in Taxonomic Assignments

[0178] A frequently reported result from any 16S rRNA gene sequence-based survey is the relative abundance of bacterial phyla. Given the broad nature of these phyla and the fact that a relatively few phyla dominate the human distal gut microbiota, it might be expected that the relative abundance of each phylum be consistent regardless of the amplification and sequencing methods used. However, differences were observed between methods in this study (FIGS. 13A-E). Relative to the sampled gut microbiomes (defined by pyrosequencing of total community DNA), the full-length, V2/3, and V6 16S rRNA gene datasets were all significantly depleted for Bacteroidetes (paired Student's t-test, p<0.001), and significantly enriched for Firmicutes (p<0.01). One possible explanation for these differences is that the Bacteroidetes reference genomes are more closely related to those in the microbiomes than the Firmicutes reference genomes, thereby inflating estimates of the relative abundance of this phylum (FIG. 10). To address this potential confounding factor, 16S rRNA gene fragments from all 18 microbiome datasets were identified and classified them taxonomically. The results of this analysis confirmed that the three PCR-based methods underestimate the relative abundance of the Bacteroidetes (FIG. 13F). Moreover, results obtained from shotgun sequencing 16S rRNA gene fragments and PCR amplification of the V2/3 region showed the strongest correlation (FIG. 13G).

1. An array comprising a substrate, the substrate having disposed thereon
(a) at least one nucleic acid indicative of, or modulated in, an obese host microbiome compared to a lean host microbiome, or
(b) at least one nucleic acid indicative of, or modulated in, a lean host microbiome compared to an obese host microbiome.

2. The array of claim 1, wherein the nucleic acid comprises a nucleic acid sequence selected from the nucleic acid sequences listed in Table 13 or Table 14, or a nucleic acid sequence capable of hybridizing to a nucleic acid sequence listed in Table 13 or 14.

3. The array of claim 1, wherein the nucleic acid or nucleic acids are located at a spatially defined address of the array.

4. The array of claim 3, wherein the array has no more than 500 spatially defined addresses.

5. The array of claim 3, wherein the array has at least 500 spatially defined addresses.

6. The array of claim 1, wherein the nucleic acid sequence is selected from the group consisting of sequences encoded by SEQ ID NO:1-273.

7. The array of claim 1, wherein the nucleic acid sequence is selected from the group consisting of sequences encoded by SEQ ID NO:274-383.

8. An array comprising a substrate, the substrate haying disposed thereon
(a) at least one polypeptide indicative of, or modulated in, an obese host microbiome compared to a lean host microbiome, or
(b) at least one polypeptide indicative of, or modulated in, a lean host microbiome compared to an obese host microbiome.

9. The array of claim 8, wherein the polypeptide is encoded by a nucleic acid sequence selected from the nucleic acid sequences listed in Table 13 or Table 14.

10. The array of claim 8, wherein the polypeptide or polypeptides are located at a spatially defined address of the array.

11. The array of claim 10, wherein the array has no more than 500 spatially defined addresses.

12. The array of claim 10, wherein the array has at least 500 spatially defined addresses.

13. The array of claim 9, wherein the nucleic acid sequence is selected from the group consisting of sequences encoded by SEQ ID NO:1-273.

14. The array of claim 9, wherein the nucleic acid sequence is selected from the group consisting of sequences encoded by SEQ ID NO:274-383.

15-32. (canceled)

The application's sequence listing, which the Patent Office published only in electronic form, follows.

SEQUENCE LISTING (383 sequences)

SEQ ID NO: 1 - protein, 471 aa, Bifidobacterium adolescentis
MTSLNEPQTGAVAHETSAANAAARATHDAAGNTTSAASTENLIEHPRGAEPGKPGRRDAFYFEQKTRLPDAADGKGRGGARYGRTGIIHTPHGDIHTPAFVPVATQAAMKAVLPETMKDLGAQCLLSNAFHLYERPGEQVLDEAGGLAKFMNWNGPTFTDSGGFQVLSLGAGFKKTLAMDVTGMKSDDVIAEGKERLAFVDEDGVTFKSPLNGSLHRFSAEISMGIQHKIGADIMFAFDELTTLMNTRGYQERSVERTYRWAQRCVAEHKRLTEERLGKPYQALYGVVQGANYEDLRRHAAEQIASLDFDGVGIGGAIEKRIIGDTCAWICDAMPESRPRHVLGIAAVDDIFACVENGGDTFDCVAPARCGRNGAIFTRHGRYNIKRAQFKHDFSPLEEGCDCYTCTHYTRAYVDHALRAREFNGFTLATIHNEHFFVKLLDDIRESIDGGYFNEFRDETLAKFYENGSKG

SEQ ID NO: 2 - protein, 336 aa, Bifidobacterium longum
MKASIEDVARQAGVSTATVSRAFSRPDMVSAKTRAKVMEAAQQLDFSVSRMAGILKSGRSHRVALLVGSSKLDWFTSRIIEGLNEVLRSAGYDLVIQPIGDAGAREEFFDELPVRGNADAVIVSSFAITPAEIRRLNTTRIPLIGINTASQGFTASVGIDDKAGIRLIVRHLTTLGHRNLLYLYETFDATMGFSSHNRVTGFLEACSELDGVTGQTMDMQAGDDPVDAALTALLARDDAPTALCFHQDSLAIPLFFRLRQCGMAIPTDLSVTGFDNSTFSGEVGLTTVRQKPYDMAVAAARKALDLIEGRTLDQPHEIFPVQLLVRDSTAAPRVRG

SEQ ID NO: 3 - protein, 438 aa, Bifidobacterium longum
MVSHNKRIVAALAAVAAMGIGLAGCGGSDTAGDTKPGSDGGVVNITYMHRLPDSEGMTLVNDIVAKWNKEHPNIQVKATKFDGGPADMIKKLETDVKAGNAPDLAQVGYAEVPEVFTKGLLQDVTDEAAKYKDDFASGPFALMQVDGKTYGLPQDTGPLTYFYNAAEFEKLGITVPKTADELIETAKKTAAQGKYIMTFQPDEAMMMMSGQAGASGPWYKVDGNSWVVNTQTKGSKAVADVYQQLIDNKAALTNPRWDASFDNSIQSGQLIGTVAAAWEAPLFIDSAGGTGAGEWKVTQLGDWFGNGTKTGADGGSGVAVLKGSKHPAEAMEFLDWFNTQVDDLVSQGLVVAATTADAKTPQKWSDYFSGQDVMAEFKTANDNMGDFTYMPGFSAVGAAMKQTAAKAADGSAKVSDVFDTAQKTSVDTLKNLGLSVKE

SEQ ID NO: 4 - protein, 759 aa, Bifidobacterium adolescentis
MSSYSAQLREEQQAVSRAYDRLDALRAQARSRLDTVRAAGSHGSPTQRTERDSFATMYEDRLTQLRAVEDRLVFGRLDDVHGAHRYIGRIGLSDEDHEPILTDWRADAARPFYEATPSNHGDIVMRRHITLSFREVVGVEDEVLDVHSDQVGEASSNGTLTGEGALLASLNAKRTGKMTDIVATIQGEQDRIIRADLNQAVVVQGGPGTGKTAVALHRAAYLLYTHRRALQRSGVLVVGPSSTFLHYIDQVLPSLGETGVVSRTIADLIPGIIATAHDDPYAAKLKGERRMAKAIANAVAARERVPSHLPVIRINGFNVPMVRADIEQAIADAKRTRQPHNKARETFVRDMLSAMRNRYVERLDYEPEQAELNDVMQQLRMNDDLRKTLNLAWLPMTGEWLVDQLFAKPQQLRRFAPWLEERDIKTLTRPKGSPFTVSDVPLLDEAMELLGPDPKAVARQKALDAKRAEEEQFAKDTLAQAGIGSGIVTSQMLVDNINGMDAELTAQRAAADREWTYGHIVVDEAQELTAMDWRMLIRRCPSRSFTIVGDVAQTSALGGTRSWRRMMDPLFGERNWQLNELTINYRNPKEVSQLASDFASSEGLYISTVNAVRGVPDSVKRLTLRDDSLIGDAVAQQTVELVRAYVSSDGTGRVAIIAPDDMLKPLRARVYAQLQDELDPKEFDRLDAQSSWDEQVTVCSTQTVKGLEYDAVMVVQPGRIEENAPSRIVAASDLYVAMTRPTQRLLILRTKDDEKLLKL

SEQ ID NO: 5 - protein, 471 aa, Bifidobacterium adolescentis
MRHAGVPEGFAIFEHLFQNCRIVVYHGIMSTAPRIAAAKRDWGHDEVGCTVLHIDMDAFFASLEVARHPEYADKPVIIGIGNRSVVSAANYEARKYGINSAMASSRARKLCPNGVFLPVDIHYYREMSRRIFTEVFSRVTDRIEQVSVDECYMDVSGALLRWKSPRAIGAWIRDQVARRYHITCSVGIAANKLVAKMASTNAKPDGMLMIPVARHAEFVQMMPLRGIPGIGPSLEKRLNAWGVDSVADLAKMSMESLEQATGSAISARGLYMAARGLDDRPVAPRAQEKSVGAERTFDKDTQDMRQVTSMLRWCCDDVAGTLRRRGLMARKVMVKLRFPDLSYATKGHTLDCPTDAASMLYPQCVALLLAMMGMPESSIDAISLTRPVRLAGMSAGGLVEAADAAVQLSLDDMLEERNEVQRGRGTDAEPSTQSERLRGAEAALDAVRLKYGKGSVRLGIWRAGPSGNLEH

SEQ ID NO: 6 - protein, 570 aa, Bifidobacterium adolescentis
MSEIKEGNLAEIKDLSVSFMTDAGSIKAIDKISFEIPRKKVIGVVGESGSGKSVTARSLIKLLPETATTSGAVYLSNRAGTEELEVLSLSGEQLREMRGAEAAMVFQEPNSVLNPVYTIGWQIEEGLRAHGMKDKKELRAKSIDILKKVGIPDAETRIDYYPHQFSGGQKQRIVIAMALVLNPGLILADEPTTALDVTVQAEILDLLRLARDEFDASVLIITHNMGVIADIADEVVVMYRGHVVEQGSVEQIFYSPKDDYTKRLLAAVPRIGQKLVVKDADGKVIEREKDWRDQPIAVEAKGLTITYPGHLMQPDFKAVDGIDFTIHRSEVLGLVGESGSGKSTTGRAIAGLQKVSGGSLNVLGIEMNGVKERDFKPKRADIGFVFQDPGSSFNPLMTIAENVAEPLIVHKKFSSVSDARKYVGDLLEMVQLPRAYMNRFPHELSGGQRQRASLARALALKPSLLIADEPTSALDVSVQAKVLELFKKLQAEIGFACLFITHDLAVVDMLADRIMVMHKGQIVEHGDADQIMQNPQNPYTQKLLASLPVPDPREQRKHREHLHELLAAQQ

SEQ ID NO: 7 - protein, 487 aa, Bifidobacterium adolescentis
MSNLVFDESSSNREASHGYAWWFSGDTFEKAMAEDRKPRKRGLTRRLVNHPGRLTIFYFLTLAALSTTLLMTPIATPKDETTTFTTAFFTAVSAISTCGISIVNSTTHWTTFGQGVLIFAVQMGGLGVMTFASLIALAVNHHLKATQRMLTANELGTTKLGEIKGVLTVVITTAFVIEGITFVALFPGLYKVNHGNVRHTLWESLFFAVMAYNNAGFTPDGAGLHVNNWAVGLPILASAFCGTLGFPVLLNLMRSWRMRRPPKRWSLHTKLTLTTTFCIVIASFTWFLLMEWNNKLLFAGNGIEPRLWHAMVAAVMPRSSGFDLSWMPGVSDATKVFLSIVMFIGGGSTSTAGGIRVTTFAVTLLTCRAAFTGRHDINAFHRRIHTQAVMTAVAVSTACLMLVTVVSMALMIITGCSLCDALFDTCSAFGLGGYSVGVASESSPTVLYILAATMFIGRLGPLTIAYAISRPHNLEAVRYPTEQIVVG

SEQ ID NO: 8 - protein, 498 aa, Bifidobacterium adolescentis
MAEKLMKYADAVKKFDPVIGLETHVELSTTTKLFCPAEVHFGGEPNTQLTPVSLGLPGSLPVVNKTAVDYAIKLGLALHCEIAEWSQFARKNYFYPDMPRDYQISQYDKPTNGNGYLDVELEDGTIFRVPIERAHIEDDAGKNTHVGGADGRIEGADHSLVDYNRAGVPLIEIVTKPIEGAGDRAPEIAGAYMRAIRDIVRALNISHARMEQGNMRADVNVSLRNSPSDPFGTRSETKNVNSFRGIEKTIQYEIRRQAAILSEGGEILQETRHWDEASQTTAGGRVKSDADDYRYFPDPDLVMLHITKEHIEEMKAQMPEMPRERRNRLKGEWGFNDLEMRDVLNADALDLLEDTVKAGASASGAKKWWLGELSREANNKGVSLEELPITPADVAEVEKLIADGKLNDKLAKQTVAGVLAGEGTPDEVVKKHGFQVVSDDGALEKAVDEALAASPDIVEKLKSGNMKPMGAIIGAVMRATRGQADAKAVTKIVMGKIK

SEQ ID NO: 9 - protein, 421 aa, Bifidobacterium adolescentis
MEQNEVLKALRRDHAAELKLAAERLKGTARHTEIIPSPVLSEMTGHEILLKPENLQVTGSFKIRGAYNKIASLSDEQLAHGIVTASAGNHAQGVAYAARERGAKATICMPQITPPLKVDATKAYGADVVLCGEVFDESAAHAQELSDTEGMIYVPPFDDYEVLCGQGTIGLEILEDVPNVTDVVVPLGGGGLGAGVALAIKTFKPEVRVIGAIPEGSPAWKNSLAAGRVVAADQVRTSAEGVAVKRPGDLTFALLNEFLDDLVTVTERDINEMILLMLEKHKLVVEAAGAVSLAALEHLNLRSRKFAEAKGPHVVVPILSGGNEDTVSISAVIQKGMIARGRIMNFEVELPDTPGQLVKVATILAEQRANVIALDHDQFKASSHYTDSVSLGVTVETNGPEHIDRILDAMRAAGFQPKRIY

SEQ ID NO: 10 - protein, 572 aa, Bifidobacterium adolescentis
MMKGPINMAINPPVDATKTPEWAALQKHYDELQSEGISLKQWFADDAERVEKLSFDAGDLHFDLSKNLIKPETLQLFADLAKAVKLDERTKAMYTGVHINNTEDRAVLHTALRRPVEDEGKYIVDGQDTVKDVREVLDRIYAFADKVRSGEWTGVTGKKIETVVNIGIGGSDLGPVMVYEALKPYADAGISARYISNIDPNDLAEKTKGLDPETTLFIIVSKTFTTLETLTNAREARTWLLEELKAKGAIDGSDAKNAEAIKKHFVAVSTNLEKVAEFGIDPNNAFGFWNWVGGRYSVDSAVGTSLAVVFGPARFEEFLHGFHEIDEYFANTPFEKNVVVLLGMLNVWYRNFFKVASHAVLPYDQYLHRFPAYLQQLTMESNGKSVRWDGTPVTSETGEIFWGEPGTNGQHAFYQLIHQGTQLIPADFIAFVNTPNPTKDGDQDVHELFLGNYFAQTKALAFGKTADEVRAEGTPEEIVPARVFTGNRPTTSIFGVALTPFALGELIALYEHITFVEGTVWGLDSYDQWGVELGKQLAKQITPAISKDDDALAAQDPSTQSLIKFYRANREF

SEQ ID NO: 11 - protein, 1625 aa, Bifidobacterium adolescentis
MMSEGDAIIERMYECMDLFSEATNAWFKHAFNAPTEAQRLAWPAIRSGENVLVVAPTGSGKTLCAFLSAIDRLMTKEGDDLLRTSGGGDGTAESDCNAKKRKPVRGVKVLYISPLKALGVDVAKNLQAPLAGIAGQCEAMGLPSPKVSVGIRSGDTTPQERRRIVSHPPDILVTTPESLFLLLTSKARRILSAVDTVIVDEVHAIAGSKRGAHLALSLERLESLAGRSVQRIGLSATVEPPAEAARFLGGTRPVRVIRPESHPDMDLKVVEPLSAMRDPVSDDAGRRAGAVKLPNRHTTHISGVSPAMEALAERKGLTSGGGDEHTSRVSTGGSVWPAIERSVLDEVLKHHTTLVFVNSRGLAEKLTARLNDLYAQLRTSRKTGSETAVKADAGWDALSDRRLGRTALSVSDNASQPESTASDSTQPYPDLGSPEGREGFAKHYDSVVGSTTMLVSSHADADAIAMAHHGSVSKDRRKQIEEQLKRGQLRCVVATSSLELGIDMGSVDLVIQIAPPLSVSSGLQRVGRADHKVGGVSHALFYPITREQIIGTAASIECMRSGDIETLTIPCNPLDVLAQQTVAAAAMDDLKPDDWYVTVRKAAPFEDLDRTMFDAVMGMMTGAYNGEDFSAFRPPLQYNEEAGLISARPGAQRLAVTSGGTIPDRGTYTVVLPEEGSGPGPRKVGELDEEMVYESRVGDVITLGTSTWQIQEITRDRVVVVPAPGRTARLPFWHGEGDGRDAAFGRSQGRFIRDMAQGLRAEVSDGIAGDKTSRFDTTTIARLRRDGLDDNAIGNLADLLAEQRAATGTIPNDRELVVERCQDEEGDWRVIVHSPYGRRVHEPWAMAITTRIKQRYGFDGQVYAADDGIIIRLPDGDGNLPIRELLLFDTEELQRIIGTQVGESVLYAARFRECAARSLFLPRANPGRRVPLWQQRLRAAQLLNAARTRKNFPLLLETARECLQDVYDLPALKHVMSGLRSGVISLSETVTETPSPFAENMLFGYVGAVMYQYDVPQAERSTQLLSMDPEVLERLLGATDMASLLDADVIAQVGKELAGRTFWNDLDETDIAGRVARYVKTHGPFTADQMIAELGLDAVQGVRMLDELHAKGELLKGHFVDDAAGADANGSDDSASERSPRQTPQQWLHKDVFRRIRALSLAKARKAIKPVEPAVYQAFLLDRQGVGPVGGARYEGVDGLMRVIEQLEGIYLNASVWESSVFPARVRDYQPSMLDELLASGDVVWVGSKINGSNAKEAGGIAFHPADSRLLTKPGEQSQNNAYSAGTMTVPETILAALSNGGAFHARQLSTAAKAIWQEHAEVNVNPETGEIILPSWGESQFEEALWSLVWQGKVTNSSFVPVRALAQGTVSVRAPRTAARRRVRIHASTPATLGGLWSAVDSSRTSPMAIPDQADDTAGKPTAGIEEYDIALIESLLDRYGVIAAPLIDKEQVAGGFSGLYPVLKRMEEHGNLVRGMFVKGFGAVQFAGRDTVDALRGDDEARSQSCVALDVTDPANLTGSAITWPEQHHMKPARRAESVIVLDHGMPVLFAVPKSHRIVSFTDDERILQPACTELAYALQHQSKGSVSFAEMNGESLKERNEYRRLLHAAGFVDSPQGMKLYG

SEQ ID NO: 12 - protein, 412 aa, Bifidobacterium adolescentis
MALISLEHVSKVYPKGTRPALDDISLDIDRGDFVFLVGASGSGKTTLLSLLLREEEATDGEIRVAGNDLRRLSARQVPHYRRQIGFIFQDYKLLNNKTVWENVAFALEVIGTSRSTIKSLVPKVLQTVGLTGKENNYPHELSGGEAQRVAIARAYVNHPQILLADEPTGNLDPTTSLGIMEVLDAINRTGTTIVMATHNEEIVNSMRKRVVELHTGKIVRDEQQGSYDSALYFPDAEVESKSHQALGTSDPNAKYRRQNAIDSTNAPDDTVDVEGATRAETVVNAVDVVAAAVHDGQGNDGIARLAKSVHSGRTGRYGEAFASVETTLTWGKGLSLEQMADQEQAEQTERNEQAKTSAENDASETGADEASALSAPPAPPVPPTQTEPPTPPEPPVPPAPSDENPEDTKEHD

SEQ ID NO: 13 - protein, 529 aa, Bifidobacterium adolescentis
MVCDFRALISPHIQICRSTVGIMSLRFNSDGTFRVLQMADIQDGPDVREDTIRLIEAAIRKAHPDLIVLTGDQIRGYDPAYIDTFLRRRGEQPGTHVRAVTEIEAKIRGIKRHPIAKTLTKSQPSDERWMIDGIGTDSPKLVKSAGRNGSASKLESWAEAINRVTAASLLDETRQKVRDTFAAFLGPALESHIPFAATYGNHDFQCGILADEQDDLYREFAGCMNPVAGSSPLALEPGTFALPIEASDGSGRITMSVMMVNSGDYADTADAGDGNGRQSVTEYAKYAANSRGWDLADSDGYGTPSPEAVEWLKRVQRELGRRNGDGQAVPAIAFQHIPPQEFYDCLHEVPAYTPNAVEGAREFAGHCYVLDRDVCRPGSRLGEAIGCADVNVGEVDALREAGGYFALFCGHDHKNSFVGHVHDIDLGYAPTCGFECYGPKSRFRGIRLFEFREDNPMAYVTRMLTWGDLVGRYSSNELRVFFEDHCVTDLIGVRNELRRPQVSATLLGAGAVTCGAIGYAVRGLLRKSQ

SEQ ID NO: 14 - protein, 300 aa, Bifidobacterium adolescentis
MKIDIVSVFPEYFEVLNLSLLGKAQEKGLVEVTAHNLRDWTHDVHHSVDDTPVGGGAGMVMKPEVWSECLDELLHLEPTTVTCDSTADADDTASADAAEPAESATEIAANADTVPATDRPVLIFPNPSAPLFTQQDATELSHANHLLFGCGRYEGYDARIPQYYRAQGVDVREYSIGDYVLNGGEVAVSVMLEAITRLLPGFMGNAASIVEESYTGENALLEHRQYTKPADWRGIKVPDVLLSGDHAKVDRFRRDEALAKTNELRPDLIEALDCSKLDKADRKTLMALGWEVSGAHPRQR

SEQ ID NO: 15 - protein, 508 aa, Bifidobacterium adolescentis
MNADSTFAPLPPIFAQLGLAYDDVLLLPNETDVIPSEVDTTTHLTRNITMKVPAISAAMDTVTESDMAIAMARNGGIGVLHRNLSIDDQAAQVDIVKRSESGMISDPLTVSPDVTLADLDKLCGRFHISGLPVVDKDSKLVGIITNRDMRFIASEDYDRLKVSEVMTRENLITGPSDISKEDAHDLLAKHKVEKLPLVDSEGRLTGLITVKDFVKTEQYPDATKDEQGRLRVAAGIGFLGDAYNRASALMEAGVDVLVVDTANGEAKLALDMIRRLKSDSAFNGVDIIGGNVATRQGAQAMIDAGVDAVKVGVGPGSICTTRVVAGVGVPQLTAVYEAAQACRAAGVPCIADGGIHYSGDIAKALVAGASSVMLGGTLAGCEEAPGEKVLLHGKQYKLYRGMGSLGAMAPRGKKSYSKDRYFQADVTSNDKVVPEGVEGEVPYRGPLNAVLYQMIGGLHQSMFYIGAHNISEMPERGRFIRITDAGLRESHPHDIVMTAEAPNYSGRQ

SEQ ID NO: 16 - protein, 382 aa, Bifidobacterium adolescentis
MGFHEFSSPYDWSRIASYKRTAKAAFGGMVDLSVGSPVDPVPDSVRKALAVSSNDPNAYGYPVTAGTADLRDAIHEWFAAARNVDLRAIGADVVPTVGSKEGVALMASLLHFSEGDVVVQPKVSYPTYEIGTQLAGAQTLKVDDVADADSWKDVPGVKAVWVNSPCNPTGEVLSAERMAGIVRAARAIGAVVLSDECYALMQWEDDVAEADADTLASTPCALRADVCGGSAEGVLVLYSLSKQSNMAGYRTALIAGDRSLIGPMAAYRKQIGQIIPGPVQAAMAAGLRDFDAVKTQHARYQERLGMLVSALRAYGYCTDMPQGALYVWVKAKSGDCWEDLRQLAEIGIVASPGEFYGAPEYLRFSATASDAAIASAAERLAR

SEQ ID NO: 17 - protein, 1024 aa, Bifidobacterium adolescentis
MDDRKKDQSIQSHANFDGDSATGDRTQIRQDQQNQQPPQIDPSLADAQAVAASLGVDPNTGLSQAEAERRLAQYGPNELASAPPVPKWKKFLAQFKDPLVYLLLAATGISLIAWFIEKANAAPGAEGGEILPFDAIVIVLILIVNAVLGYIQESKAEEAVEALSQMTAPQTNVLRDGKIARINTVDVVPGDMVVLGEGDSIPADGRLLAAASLRVAEASLTGESVPVGKNVDTLAEAKALGDRANMVFNGTSVTQGTGRAIVTSTGMRTQVGKIADLLQATDDDDSPLQKEMNYVSKILGIAVCIIAAVVLVALALTEGFNDIHDVIDSLLLSVSLAVAAVPEGLAAILTVVLALGVRRMAEHHAIVKKLHSVETLGSASVICSDKTGTLTRNEMTVERVVTPSGEVQLTGTGYAPEGRMIAIDAAEAAGITGAAEAAQAEAVTTLAVGAIANDGELRETAVETVRNGADSASSANTLWEAVGDPTEVSLIVAARKVKADRKYANYTRVGEIPFTSDRKRMAVVAQDNADAGRLTVFAKGAPDVLLGYCSRIAVNGAVRPMTQGDRQQILAAVERLSAEAYRTLGQAYRPLGTASLADVPGVAINAAGHVVDIAEQSDVLENDLIWVGMVGIIDPPRTEVRDSVAEAHRAGIRTVMITGDHPLTAARIASDLGIIDATGAADLGSTVLTGTQLDELPDEAAFDNATRNISVYARVAPEHKLKIVESLQRQGNIVAMTGDGVNDAPAVKTADIGVAMGITGTEVTKQSAKMILADDNFSTIVEAVREGRGIFDNIRKFLRYLLSSNVGEVFTVFGGVMLAGFLGISQPGSQGVTVPLLATQLLWINLLTDAAPALAMGVDPSTDDVMARKPRKLTDRVIDGQMWGDIIFIGIIMAAVTLIGMDMHLAGGLFTDRSVDAIGHDAQMTEARTMGFTILVFAQMLNALCSRSHDQSVFVGLFANKWLWGAIALSTLLQLAVVYVPFLNTAFGTVPLSAGAWVECLGLAMIVLVASELRKCVLRAMHRR

SEQ ID NO: 18 - protein, 675 aa, Bifidobacterium adolescentis
MKPQLGDTISNRYVLVSPLREETGLQVWKASDHVLARDCQLFIVNNRKALQDVNATASMLAISHDAHFTQVLQLQHVGEVALVITQLDAGMSLSEYLTQSSKPLSFTAIRSILGEVVEALHVLQKDNLTHFSISTDTVRLTRNGIEIADAPVSIMLADTSRVQSVENQEQLAIRQVASLLYSLLTRTPSTLSTNYHLDAISPNVPMEFRVICKRGLDLKEKDGFPTVPMATIAELEALLGDYEPLAKLNGPDIALPSADSECSIVNVPLLQILEQDAIALPDTLAETGSIPEMTFEAPEPHTDFSDSKEALAKGMAATGGAVKSLWNNSRELLSEEDLDGSSEDVDSPFSFPIRVSTPSPQGDYHTDDSQLEKTGRIPVIGPDGRVIEPGEESARALKAEQEAIDAAYQNENGAPVAVPPSFAPKASSSSPAEVANAKLFGKLTTKVVAIVVAFIVVAVALGFAIHGLTKKPDDGITNTNSNNPWPEMNLDDVPFGNNGDSGNGSSSASDANSDSNDADSSDNGSSDSSKPKKTTKKNHSAKKDVDKVVTSDKKVRKVPEPKMPENTTPYEIDNRQFLSNPDGQQGYGYYLHLSQPQKAYRMVIKIRSSGGQGYIRVNAKSSPNQGEQVAQFEFDASGTTEIKFNKAVETQDILLWVPFDSLPGNQLYIDSVQIF

SEQ ID NO: 19 - protein, 381 aa, Bifidobacterium adolescentis
MAEKAEATVVFGVLNETSEHESRVALTPDIVTRLRKSGVTCLIESGAGVASHYVDEDYTKAGAQVVSADDVIARADALGFVDRPSNELLARVKQGTWIIGMLGSFTDADYVAAIEKAGLVGVAMEKLPRQLSSAQSMDEMTSQNSVMGYKAAIVAANAYGSFLPMMTTAAGTIRPAKVLILGAGIAGLQAIGTAKRLGAVVTAYDVRPASKGEVESLGAKFLDLGLDFSKGQGEGGYARALSAEEQAQQQAAVDQKAAGFDIVITTAKVPGRKPPVLLTKAGVAGLHRGAVIVDCAASDLGGNVEGSSVGTQVTDNGVTIIGAPYLASGVSTTASNLLSRNVADVLAHFVRDGKLAIDLNEELDNAMVVAGRGEEAKKEEE

SEQ ID NO: 20 - protein, 345 aa, Bifidobacterium longum
MINDKAILVGVDGSHASYKATWWAANYAKHAGLTLQIVCAYSLPSYAAVSFDATYTAMGDDNAAHSDAQEILSKAKAIADEQGVEAATLIVTGDPASVFVELSRNYNLIVIGNRGKGGLAERLLGTTSSSLPAYAYCPIVVVPYTDDDGNLMHLNNTITKVAVGSDESKWGLKALDIAADFATCWGAELDVISAVPNLKGVDGEDAVMESYKDDLEVRIKPLQESHPDLKINKQIVSGPAVSALTKASYDHDVVVVGSRGRGGFTGLLLGSTSQGLLQHAVGPVYVVPRKYVEAAESRLDTVPSSPAEVPTKSLEEIAGVEEIPVSAAEPEVAQQIEKTIDPDRQ

SEQ ID NO: 21 - protein, 477 aa, Bifidobacterium adolescentis
MGVVLKSAKLVKQLTAICCAGVMAASAAACGANTDTRTQITVWSWEPSMKQVIAGFEKDNPDIRVVWKNTSGYDKLNNAIQDGYGIPDVVQLEYYALRQYAVSSQLVPITGRTEGYADFYTPGTWASVQLNGRVYGLPMDSGPMAFFYNNSVFEQVGVDASKIRTWDDYYEAAKKLKKIGVYITADSGDASFYDTMIWLAGGRPFSTSNDGKNVTIRLTEDKGTREFTEFWQKMIDEGLVATNLTSWSDRWKSAVGQGKVASLFSGAWLPSLLMSDIPGAAGLWRVAQMPTPDGKATTSENGGSALAVLQRSRKPEASYRFIEYACHNAKGITTRVDGGAFPADKNTLSDSKFLSKTTVTDDRGIEVPYFGGQEYNRVLSQAAENVSTGYQYLPFEVYARSDFRSTVGKAYKWSSLLRKEQNRLNIIAAGGQVSDTSNIGDALKNTESSDRIKLKGGIALWQKDLKEYGANQGFTIQ

SEQ ID NO: 22 - protein, 326 aa, Bifidobacterium longum
MKTHKAVASLISAAQNELRCVYSRNEAEQTALRRRAQSGELLKVYDGIPSLYANTAYWDGLTPPERTLHMARALAQEHPQWVFGGLVAVSAYGFEHQWHLHDGCITIVTSDHGSRQCHQRLRHVYMPDMNNPKTHYEASGLSLISPARTLVEAAIDLDFRFALPIFDSALAKGITKEEIAADCVQWRIDYARVFRLLRYANERSENGGESLARGTIIEDCFLTPRIQVTVTDPQTNTEYRVDFVWKLDDGRVIVAEYDGTQKYVDPAMTDNRSIQEVVAKERARDEGLKRAGATEIVHFTYADVIERTPLRVKLIKAGVPQVETSA

SEQ ID NO: 23 - protein, 834 aa, Bifidobacterium longum
MAESNQRTARAQKALKAQKAQSGAAKAKARQEEEALLRADTFTNAPKVSRRTLTKEEREALAKQREAETKEAEKIASAWSKGGLGRWWARLQSSPDKVTWGMAIVALGVVYGDIGTSPLYTAQTFLAGQGGLGGVDREAVLGMLSLVFWSITLITTVKYVLIAMRIDNNGEGGIFALYSLIRKYGAWLAIPAMLGGAAFLADSVLTPAVSISSAVEGLQTLPPLEGLFDENPSLTLMITVVIIVILFSVQSRGTESIGKVFGSMVLVWFGFLAIVGVTNLSNDWSVFEALNPVYGIKFLFSPHNAAGIALMGTVFLSTTGAEALYSDMGHVGRGNIYFTWPFIKVALVLNYFGQGAWMLANSDNPQYTATESLNPFFQMMSPNVRYLAVILSVSAGVIASQALITGAFTMVSEATRLNWMPHLQVRYPARTRGQLYIPVVNGVLCVSTLAVLAIFKDSEHISAAYGLALTITMITTTVLLGVYLWHSGKRVGAIVFTVLFLAIQAMFFIASMAKFLHGGWFTMLLTAAILFVMYTWNEGTKLERAQRRHMRPNDFLPALDKLHSDFRIPYFADNIVYLTSDSETKRLDTDIFFSIFADHPKRARAWWAVSVETTDEPFTREYSVEDFGTNYIYRVRFRLGFKVSQSIPAYIHQIMHDLSKTGELPKQKSIYPKVDADPDIGTIRYVLIHKALMPESKVSARGALSLQAKYAIRRMAGSPVKWFGLAPYNPLVEVQPLFVSTRRPPRLKRTDTAKTITTPTPTRAVADPAAVPDPMDTTSGLGRLVQELDAAVSAEERKIAETAAAAAVAEQGDKGKAKNGKPAAKPQRSSKQKR

SEQ ID NO: 24 - protein, 410 aa, Bifidobacterium adolescentis
MITMAQTQEINIPVADPSDPYANPAAMPSSADRAPRSFDIEAFAKPDRKQEDWRYTPIERIEEFFDVFEPSNETQVTVSMIDGSPLAEGVTYAEGTVGDTGTGIVSKPNDRVSAVEWNSGKRAGILTIDGEIDQPVLVKMHGTGKDLDAFHLSIIAADRAHADVVVEHDGDARLAEGVEITTGKDSHISTTFIQEWNKDSKHVGNQRIHVGEEASLRHSVVTLGGDVVRIRMDQDFGGEQGDLNMLGIYFVDPDEHIEHRTMVVHNHPECKSRVVYKGALDGKGAHSTWVGNALIEPTAPGTDSYELNRNLVLTPGAIADSEPNLEIENGNIIGAGHASSVGRFDDEELFYLESRGISENEARKLVVRGFFGELVEEIGIPAISEHLMNVIDKRLARGESDAIAQVLEEK

SEQ ID NO: 25 - protein, 1036 aa, Bifidobacterium adolescentis
MGTMASSTHQFGVLDLIRAGLQDLDTARTLLDELRADGIDDDRLCLLMKTLEQTCEPDIALRNLVDIIKALQSQGRDFHQVITDDAGLVRLVTVLGVSDEMGKLMRFRPELVMAAASDSCESHLYNHAQRRAHVLEAVGADPVDSRTPKASKPLAEAATALRQTYRKQLAAIMAQDTTAEDPIEIQPRISQELSDLADAALEGALAIARNEVDGSEHVRFAIIGMGKLGARELNYVSDVDLIYVVEPADADTNGMTLNRVGTKMATTLQRVCQSVIMGVAEPTLWQIDGGLRPEGKDGPLVRKLESHEAYYEQWAENWEFQALLKARPVAGDPDLGQAYMDMTRPFVWAASKRDNFVYDCQQMRKRVEDLIPAPLKDREIKLGRGGLRDVEFTVQMLQLVHGRADETLRTSSTLESLQRLAEGGYVSRRQAKKLSWDYRFERVMEHRQQMWALKRTHLFPDLGKASLGGIERKRDTNDDELNHNLELRRLARAFHMHPEELVDKYDETRREVRHLHMDIYYRPMLPINAGLDDEQVELSANAMQERFASIGFADPDAAMRHVTALTAGISRAAKINRILLPAALQWLGEGQNPDMGLLNWRKLEEHFGTDSEYLGFLRDSPSAAQRLCHILSNSRFLGDALNKSVESVTWLGSDNDLQPRSRESLDVQTHASLERNAGSINDFANSIRAMRRHEIERIGLGWMSGVIDDKASLAGMTDVYDAAIDASLTWAIRHQTQEMGLDEAPAAIAVIGMGRYGGREVNFSSDADVIIIYRPSDNADDNQANLFARKVQEDLRAILQGPTTLEPKIELDMDLRPEGKNGPLVRSYASCEEYYRSWASTWEHQALLRARYAAGDAALAEDFLMNVADPLRYPKIDLTEAQVAEIRKLKARMEAERLPRGVRRDRHLKLGKGGLSDVEWTIQLLQLQHAGDNANLRVNGTMQALDELERRKLVSAGDAVVLRRAWWMCTAARNGSYLWSGRVNQADILPDDTYSLGGLAVYLGYDANRGQHFENDLLAVMRKARDVTERLFYGLS

SEQ ID NO: 26 - protein, 1085 aa, Bifidobacterium adolescentis
MQPLRQSTARTFPSHISTAASRIARIIVEPVGAPEALYNKDHGASQEYMTRIKKEKGLPMACPNCGQPTIEGAKFCASCGSPLTQTTAAAPQAPAAPESDDGTMLSSAPHMAPAPQMPTAAVPLPNSAAPAAPQTTVPQPTTPQPAAQAQPTAQAQATQTVAPQAAPTQQFQYAPSPAPQPAAAPQPSQPTQQIARPAADPTITALTTPQSMKTMGASLGIGLGASVVFALLASIVFFMGNAAASNGLAGIPGFSDTASFLGNNGVSGSGPNFFQILFTVMTLGVGGSLNLKTSSQGFSLSNLGIDASHVSVTLPVGLPGVALAIGAAFGAYMLARRFALRFKWTGVISSLIVGVLSGLVLLVFAAIFPVTVGGSYSDYSASASLSGVSFRTFCMAFLLSAAGALAGYALAQYAGDSGNVFSAAWRWAHRARGFVRTLVESFAIYGVLFLVLGLVATIAMSAANHLGAGGLLLVPLLFPALPIMLISLSSFGGIAFSTSSYSVHTITLFNVSSLSQYGWILWICFVLFLLATFYIALRETARNMYDPYYAGWQHTWKAPVAAMVFWLAAEFLFTYFAAGYASSSMSMTTPMWYFLVAGIWAFLIEVAAMTFGPTLVASLPGMWRIIVGGTVQQTPQNVVDYVKSCDPSYGMKKTSATASGTTATATMPTASAAAQPANPTTPAAPAASVPQPATPAAPMPAPTAPTATPVSQAVPQPVAPTSMPNTTTGNTATGAVPLPQSPAGAASMPVAAPGAGQPLDPKTKKTILISGIVIGALIVLGIVYGVLNSTVFSAKSVAQSYLTAIADGKYDKANDIADPQVDKDQLKLLSDTVAKADNATIANPHIDSVKTVEGVAKVNVTYSLNGKNVNDSLTINKDGSKFLLFPNWKISSPLLKTITVSVPNAVESLSVNGVDVTAKNAEKSDSGAWTLRVYPGSYKVSIGKSGYVTSGITMVRTNADSDAADLKIMPTAKLKEDLSKAVNAKLDECAKSTDYAPEGCPFGFDLYDEDYYRNFAWSISVYPKLSDIDLDYGTFSTRQGKAKCTYEEKNFDDSWESQDDSTHFTVNGSFSIRDGKLSVTIDDED

SEQ ID NO: 27 - protein, 661 aa, Bifidobacterium adolescentis
MEPYKKIANLLWETSSSNHASTAKLDIMPKNVNKLLVANRGEIALRVVRTAREMGIPTVAVYAEQDRHAQYVQMADDAYLLSGDTYKDTYLNEDLLIDILQRSGADAVHPGYGFLSEVASFAQKVLDAGATWVGPNPKALVDLGDKITARRVATFAKVPPVPGISQSISDMRLLLDFAHTHGYPLMLKRTDGGGGRGITLVHNDDELRGFYMNHDALQGGDLDEYFVERFIDKGRHVETQCGRDSHGNFTVYSTRDCSVQRRNQKLVEEAPAPFLSDGVLEQLETYSRRLFEAVDYIGLGTCEFMVTEQGKVYFLEVNPRLQVEHTVSEEVCGLDLVREQLTIANGGELTVDHPLRGHSFELRLTCEDPAKNLAPSSGTLTSLKWPSGPGIRVDSGVVEGDTISPKFDSMMGKLVVTASDRAAAVARVRRALAELEVQGVPTPASLFEQIFNDDEFTAEHGVAYDVSTKWLERKYLNKEASSTKGGQPASMAGASGAKEAEQKESSETFVIEVNNHRVSLTVPNDIVANLTGGAKARDAKRAIQPLRGQGLHHVEKKQQGNDGQSGVIASPMQAVVTRINVAEGQEVAKGDLLVVLESMKMENYVYAPVKGTVTKIFVGPAAGIEAGETLMTIDVNGASKAADGKPATDGNTETKTEGGAK

SEQ ID NO: 28 - protein, 780 aa, Bifidobacterium adolescentis
MTDFERHSPDVWRKTADALRETAVSDAGTQSDGRGVNKNGAPLLGDTRDLFRPKTSDIPAQPGVYKWRDGEGRVIYVGKAKNLRNRLTNYFQPLYQLHPRTQTMVLTARSLEWTVVGTELESLTLEYTWIKEFDPRFNVVFRDDKTYPYLAISSGERIPRVWVTRSRKRRDTRYFGPYAKVWDLRHSLDALLKTFPVRTCSKSVFHKAQLTGRPCLLASIGKCSAPCVNRIGADEHRRMCEQLVGVMTGRIGKSYIAQLTRDMKQASAELEFEKAARLRDQIQMLGTVVQQNAVVFDSDVDADVFGIASDELEASVHAFFVRSGSIRGERNWSVERVEDVSDAELIADLITQVYSETTGESAAVSDSTVVTERRNAIGSTQTVTATDAIARAQATKERNERQEQTGRADLLAPIAPVPREVIVPIEPSRSAGLEQWLSGLRGAAVTIRVASRGDKKQLMDRANDNAKQALARSKMSRISDMGARSDAMNDVAKALGLEQAPLRIECYDISNTVGGAFQVASMVVFEDAIAKKSEYRRFAIRGADGQGALDDLSALYETLTRRFRHGNIAGDSGESMDNERRMATQNDRSDGTNGPETDAVQQNTNRRHFAYKPNLVVVDGGKPQVMAAAKALADCGVDDVAVCGLAKRLEEVWVPDDDYPIILKRQSEGMYLLQRVRDESHRFAITYHRQTRRKGALRSALDDIPGIGEAYQKRLLNHFGSVRAMREASVEDFEQVKGIGHAKAENIYQALHSSVDIAPKAEDALRTVKSDGNSPKDEKK

SEQ ID NO: 29 - protein, 409 aa, Bifidobacterium longum
MAKTVLVINSGSSSIKYQLVDLESGEGLASGLVEKIGEPVDGHYKHEYNGEKHELEEPIHDHEQGLKRVLGFFEEYGPNLSEAGIVAVGHRVVQGGSIFPKPALVTNKTINQVKDLAVLAPLHNGPEAKGAEVMRSLLPDVPQIFVFDSSFFFQLPKAASTYALNKEIADQYHIRRYGAHGTSHEYISSVVPDVIGKPAEGLKQIVLHIGNGASASAEVSGKPVETSMGLTPLEGLMMGGRTGDIDPAVVFHLIRNAHMNVDELDALFNKRSGMMGMTGYGDLREVHRLVSEGNEDAKLALDVYVHRIVSYIGNYTYQMGGCDVITFTAGVGENDDVVRKMVCDKLAPFGVKLDEEKNATRSKEPRIISTPDSSVIIAVIPTNEELAIARKSAAIAEAGTDTYGNTFAK

SEQ ID NO: 30 - protein, 73 aa, clostridium bartlettii
MNFGQNLYQWFLSNAQSLVLMSIVVIGIYLGFKREFSKLIGFLVVALIAVGLVFNAGGVKDVLLELFNKIIGA

SEQ ID NO: 31 - protein, 562 aa, Bifidobacterium longum
MVPRIFLFRPAWLLEWCPMSCTTILVGKNASYDGSTIIARDDDSGSGRYDPKRFVAVAPDDQPRHYRSVLSHVEIELPDNPCRYTIAPNVLNNRGILAEAGANEHNVAMSATETIAVNERVLGADPMVELRPAVGEPDSTDYQAEQPGGIGEEDIITLVLPYVTTAREGVARLGELLETYGTYESNGVIISDVDEIWYVETIGGHHWIARRVPDDCYATIPNQLGIDDFDLADAFGEQREYLCSADLREFMATHHLDRTMGTPVSSNGRHAHSAGFGTTVALPTRFNPRKAFGTATPKDHIYNTPRAWYMQRRLNPSEDWDSPAARYTPESDDIPWCRVPEDKVSLEDVDFLLSSHFEGTPYDPYGTTGTAESRHRYRPIGVNRTGHMVAIQVRPYVPAANRTVMWVSFGSGPFTAAAPFYANVNDTPAYLRDTTPEVSTGNLYWTNRLIAVVADAHWYETNRFIEGYAEGVRAFGHRLIERTDEQLLARSDAESTDTNAWPLDGGHGDEKDVQGVADVLEAANDEMADYLREHTTKLLNDVLYTSSNLMHNSFAMSDRWAE

SEQ ID NO: 32 - protein, 659 aa, Bifidobacterium adolescentis
MATEETTKTTTHKRGSKAAKRTETAVKASKTTKAAKSEKTAIKKAKSSTRSRGNGGSRNGGSRGSRGGNGSNRRPSHSAPQSTAPQQDEVLIAPPKYRKGSMRIVPLGGLGEIGRNMNVVEYNGHILLIDCGVLFPEEEQPGVDLILPDFHYIKDRLDKVEALVLTHGHEDHIGGVPYLLKLRPDIPLIGSKLTLAFVEAKCKEHRINPTLVEVKGRDKLKVGPFNLEFVNVTHSIPDALAVFVQTPAGSLIDTGDIKLDQLPLDHRITDLVEFGKLGEKGVDLLMMDSTNAEVPGFVKPETSIGPALDQAFAQATRKIIVASFSSHVHRVQQVVDAAHKYGRKVVFVGRSMVRNMSIAADLGYLRLPEDTVIDLKQAHDVQDDKLVYMCTGSQGEPMAALGRIADGNHRDITINEFDTVILASSLIPGNEHGVYKVINKLVQLGARVVNRDNAAVHVSGHCNEGELLYMYNIVKPKCAMPIHGENRHLVANGMIAVKTGVDPQNVVLAEDGDVVDLYHGQAAVVGSVPCGYVYVDGDSVGELTDEELEKRRILGTEGFVSSFVVVDTETADVITGPKIYLNAVAEDESEFDKVRHQIVEQLQDAMMQGTRDTYKLQQIMRRTLGGWVARQLHRKPMIVPVVADIAQDVDDAMGLNAAK

SEQ ID NO: 33 - protein, 330 aa, Bifidobacterium adolescentis
MAMKKGPTKGSGGKHRNALKGKGPTPKAEDRVYHKAYKAKKAADRRKMADPRLAARRRVAKFTSESDDLVIGRNAVLEALRCGVPATTLYVAARIEHDDRTREIVRLAGIHGLHLLEADRLEMDRIARSSNHQGVVLKAQPFQYSSLAELVDRADKKARAMEAADSESARIAARPLFIALDGVTDPQNLGAVIRSAAAFGANGVILPERRSASVTAAAWKVSAGAAAHMPVARVVNLTKAIESLKERGYYSVGLDGGGDALVGETGFETDPLVVVLGSEGNGLSRLVREACDSIAGIPMSNMVESLNASVAAGITLYAVARARREAAAAK

SEQ ID NO: 34 - protein, 171 aa, Bifidobacterium adolescentis
MSLAWPMLAAVGAAGATWLYEWSPARNPPDSDVRSCNLPLPLILEMLSVAIRQGASIPRALITVGNIVEGEFGGGLRSAGERLNSGMPWNEAWPDDDDCAVVRDAFSSSWSSGSSPVNRLATAIEQLDWDERSRIEQSAAKLSIRLLLPTGLCMLPAFVAIGVIPAVMSFL

SEQ ID NO: 35 - protein, 475 aa, Bifidobacterium adolescentis
MADENVTASENTTETNEQAATPATQASKPAVPSPAAMKPHAPSPAAFAKKAPQRPATSTGFSEADIKAAEAFGRVADDGTVFVKEGEGEREVGQFPDASKEEALALYARRYLDLTAKLDLFANRLKSSNVKNREIDESIKTLSAEIEQPAVVGDIEALKSQFEALKEAGAAKKAELSEAHKAAVAKALAERTAIVEKAEALANSLGDNTNWRSTADKFRSLFQQWQDHQHNSVRLDKADADALWSRFSSARTTFNSARRKWAQGRDEERSNAKAAKEAIIAEAEEIKDSTAWMETSRKFNELMDRWKKAGRAGRRDDDALWARFRAAADTFFNARQADREQISSSEKENLAKKEELLTKAEALVPVKDEKAAKQARQALAAIQEEWDQIGYVPRDDMHRIESRLDAVDKQIKAVEDAAWKQSDPEADARKSSFEEQLNAQLAELDAQIAAESDPKKKAKLEAEKATKEQWLNAIK

SEQ ID NO: 36 - protein, 549 aa, Bifidobacterium adolescentis
MNIKGVGIGRGVAVGPVIRMAAPLPEPSDAPRAENISAETEIARVEKSIALVNADLNRRAEEAANGDEGAKQAAPILQAIAMFASDPSLAQSIKDLINQGKTAERAVLEGFGAVEDMFRAIGGYQAERAADLHDVGQRVIADLMGAPAPGLPVSETPFVLVAEDLSPADTAALDMSKTLAIVTSQGGPTSHTAILARARGIVAVVSAAEAAELENGTNVIVNAAKGEIVVNPSEDEIAAAEAAKSRAAAAKELRGKPGATKDGHLIPLLANVGKPSDAAKALEYGAEGVGLFRTEFLFIGNSEPPSVEEQTKAYTELLSQFPGKKVVIRMLDAGADKPLPFLTPEDEPNPALGLRGLRTLRAHMDVLEGQLKALAAADAATDANLWVMAPMVADQHEADYFVKLGKSFGLKFVGAMAEVPSIALMADKVADVADFVSIGTNDLTQYTLAADRTLGSVANYQTAWHPAVLRAIKMICDAGNAKGMPVGVCGEAAADPDLAVVLAGLGVNSLSMTPVALDDVRASLAEVTFEEAKAKAAAALNGDFYKPAE

SEQ ID NO: 37 - protein, 424 aa, Bifidobacterium longum
MVDFKAIRAQFPILDQEIHGHPLVYLDSAATSQKPNAVIDAEANFYRTINAGVHRGAHELAARSTMAFEEARAKVAKLVGANAAEGEEEVVVTGGATAGLNLLATAFGNASLGRGGEAAKRFALKPGDEIVVSRAEHHSVLLPFQELSYRTGATFKWIDLTEDGRVRTDNLDEVITERTKVVAVTHVGNATGAITNIAPIIKRAHEVGSIFILDACQSVPHLKVDFHALDVDFAAWSAHKMYGPTGVGFLYGKRDLLEALPPANFGGSMVELAYMDHEAQYMAPPARFEAGTQPVAQVVAAGVAAEWMMNIGLENIEAHEKTIAAELLKLGDVDGIRILGPRENVDRIGTVAFDVAGVHPHDVGQFIDAQGIAIRVGHHCAQPVHRHFGLYASNRASSGVYNSVEDAQALVEAAKGIRKFFGVE

SEQ ID NO: 38 - protein, 445 aa, Bifidobacterium longum
MNKLVARQRLVMTFTFFSMFFGAGNLIFPPFVGAQAGSATIPAAIGFIVSAVGLPILGVLAVTFAGGFDKLASRVSPKFALFLGVAIMLTIGPCFAIPRTATTSFEMMVAPFVPSSYGWLAQLIYSLVFFTLAFLFAQHPEKLSKVLGRFMGPLLLVLIAVLFIACLIHGIGTPANPMGDYSTNQIARGFLDGYQTMDLLAALYFGIVISANIRAQQVDDESQVQKETAYAGLGTGVLLIVIYGALSYVGVVSGAIATIDPTKDTGATVLTNLTSSLFGTFGTAFLGIVFVIACLNVCTGLIGTCATYFHTRFRTVAGRTLSYRTWQVIFTVFSFIVSNAGLSAIIKVSVPVLSALYPIAIVLVLLTLTHKSLGARFPRVYFWTVLLVGIASFATCISSLVAVFGGSIGWLDAALAMLPLQQYQLGWVVPAILGVAIGIADAPRR

SEQ ID NO: 39 - protein, 301 aa, Bifidobacterium adolescentis
MTQTDMTPLQRLAKVLQLGTPSNYRNHTYINGESLYFPTGRVYGGQVIAQSLMAASRTVAPSRLPNSIHGYFISAGDIRQDLLFDVENLRDGRSFSARRVNVTQAQGSILTAIASFQEHDQEGIEFADPMPENIPDPDSLTSAKQLMEPYAEQSPFAKYYAEKSPFDIRHVTRTIMLGADKKSASEDSGKQMVWMKADGKVDVPQVMHRAMLAMGCDQIMLEPILRRAGLSIATPGISYASIDHSMWWYRDIDINQWHLYVQDTPTAAHGRGLGQAKVYTQDGELVACMAQEAMFRVPKKD

SEQ ID NO: 40 - protein, 427 aa, Bifidobacterium adolescentis
MYASAFTDQHTDSSADMTAGFRKIEQRVWPPTTSFGAGWSTSSVSKIKLAKLGKPFQHKRKVVMSEKIKVGILGATGMVGQRFVTLLENHPWFELVTLAASAHSAGKTYEEAIGSRWKMETPMPEFVKHMVVKNVADVEDVVKDVDFVFSAVNMPKDEIRAIEEEYAKTETPVVSNNSAHRWTPDVPMVVPEINPEHYEVIEHQKKRLGTTHGFIAVKPNCSIQAYTPALAAWKEFEPHEVIVSTYQAISGAGKTFKDWPEMVGNIIPFISGEEAKSEKEPLKVFGHVDEAKGEIVPFDGPLRITSQCIRVPVLNGHTATVFINFGKNPTKDELIDRLVNYTSKAAELGLPHAPKHFIQYLTEDDRPQVLKDVDYEGGMGVSIGRLREDSIFDWKFVGLAHNTLRGAAGGALESAEMLKALGYITKK

SEQ ID NO: 41 - protein, 509 aa, Bifidobacterium adolescentis
MAIGSALSVGLIGLKAFIVQIQAFVSPGLPYFSIIGLPDTSLSEARERVKSACQASGFKWPETRVTVNLSPASMPKKGSSHDLAIAASVLSAAGAIAHDCLAGTIVLGEVNLDGTVLPINGLLPIMLHAREQGIATIIVPYANLDEARLVPDVKAIGVRHVGELIELMGGDADYRIPEATHAVNADVGATGMCPPPGDMSEVMGQQAAKWALEVAAAGGHHLMMTGPPGTGKTMLASRIPGIMSPLNETEQLEVASIRSLCGTLPGYGISDVPPFEAPHHTASTAALVGGGAGLAQPGAITRAHRGILFMDEAPEFSARTLQTLREPLESGYVAISRAKGTTYYPARFQLIMAANPCPCGYAYGNGERCTCREKDRVKYFSRLSGPILDRIDIQIEVPPVERISPGNAPSGDSSHAIRLRVIVARQMAQERFREFGWCCNAQATGTWLRANTSPKAIELVNRALASERLSLRGADRAMRLAWTLSDLAGKTSPGPEEMMQGISMRTRLA

SEQ ID NO: 42 - protein, 383 aa, Bifidobacterium longum
MVYRMIFNQTAYFGRGAIKEIPAVAKQHGFTKAFIVTDPVLLETGTAEKVTKVLDEAGLPYEVFSNVKPNPPVECIKDGVAKFAESGADFLIGLGGGSPQDTCKGIGIITANPEFADVLSLEGVADTKNPSVPIFGVPTTAGTASETTINYVVTDTANKRKFVAVDPHDIPIVAFVDPDLTDSMPRGLKVATGLDALTHAIEGYITPGAWSLSDCLSMQTIRMIAKNLAKSADGDIPAGEQMAYASYITGMAYSNVGLGLVHGMAHPLGGRLGVAHGVANGILLAPVMEYNKDFTGEKYRDIADAFGVEDAYTGDLEKVREEAVQAVHKLTVDLKNPTTISEVGATEADLEPLAHDAFNDVCTPGNPRQATEEDILAIYKSLM

SEQ ID NO: 43 - protein, 1244 aa, Bifidobacterium adolescentis
MVFRVYVEKKPGFDVAAQQLANELHTILGIGALKNVRLVNRYDVEGISEELFAQATPTVFSEPQVDNVYADLPDFGSDTVFAVEYLPGQFDQRADSASECIQLISQGERPTVRSAKVYALEGELSEADVEAIKHYVINPVEAREASLDVKTTLKAQVPVPGKVEVINGFRSMSDAELEQFIEDRGLAMDLADLQFCREHFTEEQRDPTITEIKVIDTYWSDHCRHTTFGTQLDEVSIDDATVKAAFDKYLEMRHELGRDAKPVCLMDMGTIGAKWLKKNGILKNLDESEEINACTVKVKVDVNGHDEDWLFLFKNETHNHPTEIEPFGGAATCIGGCIRDPLSGRSYVYQAMRVTGAADPTVPVSETLEGKLPQRKLVTTAAAGYSSYGNQIGLATGQVDEIYHPGYVAKRMEVGAVVAATPADHVRRETPAPGDKVILLGGRTGRDGIGGATGASKAHNVESLELDGAEVQKGNAPVERKLQRLFRRGDACRLIKRCNDFGAGGVSVAVGELADGLYVDLNKVSKKYEGLDGTELAISESQERMAVDVAAEDVDEFLGYAKEENLEAEVIATVTEEPRMTMVWNGDTIVDLSREFLASNGAPKHQVVHVEAQHGYATPWKTGTLAERMHTMLTDLNVASNKGLSERFDSTIGAGTVLMPFGGRKQLTPNMAMVAKLPVFGETTTASAMAWGFNPYIMEQNQFTGAYLSVVESLSKLVAAGFEHEKAYLSFQEYFEKLRDEPERWGKPMAAVLGALMAQVDLGAGAIGGKDSMSGTFEQLDVPPTLISFAVAVGNMKRATSPEFKGAGHRVVRIAPRYNADGLTPDKDALLEVFSAVEELTDFGDALAVSTPGYGATAEAIFKMTVGNQIGVKLADGISVDDLFAPAYGSFIIELADNAKVPAVSNLVEVSEVGETTEAYQFAAAGETLDLAELQDAWEGGIESVFPYRSNGDEKGKTVETVSFDAPKKTVYTGTGVAKPHVIIPVFPGNNCEYDSAAAFERAGADVSTLIVNNLTPAAVAESTAALVEEIKKSQIIMIPGGFSGGDEPDGSAKFITAFFRAPAVTEAVRDLLNNRDGLMLGICNGFQALIKLGLVPYGDIVPMTAECPTLTFNTIGRHQSRLVRTRVASNLSPWLAKTEVGDMHTIAISHGEGRFVASDDVLAQLKANGQIATQYVDENGVPGMDLDVNPNGSLLAIEGITSPDGRVFGKMGHSERYSNGTFVNVPGEKDQPLFAAGVEYFTA

SEQ ID NO: 44 - protein, 362 aa, Bifidobacterium adolescentis
MTSSSDLEQIETRTLSLVRDFSFLHADDPVANSCKAVADAVAQQAVTSSEGGKRLRALLTLDAFRAFAPQDVAERDMDAVLDLACAIEVFQTGALVHDDIIDDSDLRRGKPSAHRALATDTHSDAIGHGLGIMLGDMLATASVDIANKAACRLGSGSSVVSAFLNMHREVEIGQVLDLAVELNTLDDPEELASASLNVFRWKTASYTTIAPLEFGMLAAGLAPADARRLALAIGLPLGLAFQLADDLLDVIGSSRNTGKPVGGDIREGKRTVLLADAIEAAGDVERRELIDMWEAESRDEAHVRRAIALFESTGAIARSKERIAGLWLESKAAIETLELSQDRKDMLTEACARFVPIVREQG

SEQ ID NO: 45 - protein, 858 aa, Bifidobacterium longum
MHGHVFAGDLILTLVIGVLLFGVTGSITYNPGLLFDLNPSIQMAWEAAMLIPLLIRRWRPQTGALLCVALALTHLIFGPCILGADILALFMLYSVIVYGNPKNTKAFIILALAIGLLASALMAWTMTNGPLLTGGKVHTWSSWNGSNPNGAMVTEDTLGSIYTGTSMSEVADMVAQYMLVLTPIFEVCIISTVIVAFWQRARLTTVRMMRERNEAIAARDQDERDIAALAERARIARDMHDVVAHTLSIIIVQSDGGRYAGTHDPAVARNTMETIRHESERALHDMQRLLGVFGGSPHADYNDIGNLVEQAQNVSPDIRIRRNITGTASPEQLGEQASIASYHVVQEALTNIRKYAGPHVDVHIKESWNNGLLTLTITDNGHGAAANIDGHTPGYGLLGMKERIESAGGSLQAGPQLGGGFEVMATLPYGGKEQVTEETGEQYASEQSESCNTTAISSKAKLSDEAIAPHTVVNISARIPDQPSEQTKETNQPTGRDHRSNALQHLRITAPNLHDLLKSLKLKSVELANTSNSRGLNWVERVSAWTQRHYALMDSVGAVALVMLLNRMSVTFFFDSSPHAQLSNAIAACCLLALALRRRFPETCALIVFVLSVVQLVFLGSIEVGHIVASLCALYSAVLYGREHAWRWTGLAAATCSVLMGLKIAADQHGYTTLFGAIAAFAGLTKPVSVTSSTTAAFFTGVMYTVAVLMLCAGIMAWARWARSSDSNALVLQAREEALVAEQEKQRILAANMERDRISASIQAEVTATLNSVISQAVDGIRMLDSAEAQGKEPTADEISTAFKAIGEQGRAALKRMRELLGVLRETGFSDDAHAGSANELQLRPAAPLEEQLQRASQ

SEQ ID NO: 46 - protein, 204 aa, Bifidobacterium adolescentis
MARTEDSPWAVSVAQVASRPGQSKEIDATFPAPSGIGDEIVGVDEGTDVSVVGSFDSIVDGLILNARISAPVHAECTRCLKPIQRDWTVNVTSFFPYEDKSAAGKGGKAGKNGKEEEVDIIAGEDEAEDTYPLLDGGAWADLEALLRDTLVEELPLQPLCKPDCKGLCSQCGIDLNENPDHQHDMTDIRFAALEGLKAKLEGKE

SEQ ID NO: 47 - protein, 540 aa, Bifidobacterium adolescentis
MTQEQVAVTAEKIRAGKTSLGIEFGSTRIKAVLIDDAYHTIAAGDYEWASHLEDGLWSYTQEEIWKGLQTAYARMAGDVETAYGERLTHVGHIGFSAMMHGYLAFDKSGELLVPFRTWQNTNTHEAHEKLSELFQYNIPERWSVAHLYQAVLNHEEHVSKVDYITTLAGYVHWKLTGEKVLGVGDASGMFPIDPATHTYETEFIKRFDAIEEVAAQPWKLENLLPRPLVAGTPAGTLTAEGAKLLDPTGTLQPGVILAPPEGDAGTGMVATNSVRVRTGNVSAGTSIFAMVVLEHKLARLHPEVDLVTTPAGDLAGMSHANNFTSDLNAWVGLFGQFAAAIGQPVDAGTLYGTLFRAAIADDVDADCGGLLNYPFRSGEFLAGLPEGRPLFARSPEARMSLGNFMRTQLFSAFSPVKIGMDVMTKDEGVAVDSLVGHGGIFTTPKVAQKILAAAFDTPIKVMATAAEGGAWGMAVLADYLWHADQPLADYLDTRVFADAASTTEAPDANDVAGFEAFFDRFRKGLPIEHAAIESIPLETK

SEQ ID NO: 48 - protein, 337 aa, Bifidobacterium adolescentis
MKGEPLSSVLEPAVETPMVGKSVITLDDLSIRQIQEMLHKAQYIDSHRKEVAHTCEGRVLATLFYEPSTRTRLSFETAMLRLGGKVIGFAGAQLASVTKGETIADTLKTVSNYVDVVAIRHPKEGAALVASRAASVPVINAGDGGHMHPTQTLADLATLQSRFGRVTNLTVGLCGDLTFGRTVHSLIETLCRFGNVNFVLISPDELKTPQYVLDRINATESCSYTEVKDLVSVIGDLDVLYMTRVQKERFFNEDDYLRLRDTYILDEAKMAYAKKDMAVLHPLPRVNEIAVEVDDDPRAAYFEQVKNGMLMRMALESSVVGDELPGYEPLAAKEVEA

SEQ ID NO: 49 - protein, 674 aa, Bifidobacterium adolescentis
MGKTRAGRFALRGQRTALLHLETMTQAVDSADSVDPRALEALNRYFGYDSFRPGQSGIVSAILTGHDVLGVMPTGAGKSICYQIPAAILPGVAIVISPLISLMRDQVDALNDVGLPAAFINTTQTPDEQDLVFAQALSGQIKLLYVAPERLETERFRNFAVRVPISLVAVDEAHCVSQWGQDFRSSYLGIGEFIAGLPTRPTVAAFTATATERVRRDIVSILGLHTPSITVTGFDRPNLYFDVISMPRKDKASWVASYIASHPDESGIVYCATRKETEALAESLNSAVAELRAAGGADVSDIGTIAVAYHGGMSADAREKAQRDFVTDRVPVVVATNAFGMGIDKSNVRFVIHHNMPESIEAYYQEAGRAGRDGEPSRCTLLWNESDIVTRRRLLDSDYENERLTPEEQEAVRASKRRLLDAMVGYCRTTDCLHAYMTRYFGETAGAAAKTDGKCVGGCANCEHTFETIDVTDIARAISRCVHDVNQHVGSGKIVKVLRGSKAQDLSYLNPESLPSFGMLDEVPEARIRDVLSQMATDGFLTIAEGRLPIVGFGPRAAETVAPEFHYDIKKIKRADARARRTPDVSTPAVGSYVPDDGDEALFQKLRALRLDIARELGKPPYIVFSDKTLRDMVRVKPITDDQFLAVNGVGESKLKQYGERFLAAIREDSGDEA

SEQ ID NO: 50 - protein, 844 aa, Bifidobacterium adolescentis
MSEFRGMENTMNVKEATNAHDEHQNGLAVPEAKRVPKERTFHGDTFIDNYEWLRDKESQDVRDYVAAENRYCEQRMAPLASLRKTLFDEFKSHVQETDMSVPTRMDGYWYFTRTKQGEQYAVQCRVPIRGADDWDPPTVEAGVPLDGEQVVFDTNAEAQGHDFFRIGGMDISKDGRWMLYGTDTSGDERYDFRIRDLETGDELEERFEGIGGACFTPDAQWVFYVLLDDAWRPYAVMRHHVGTPVADDVEVYREADERFWVGIGLSFDERNIVIGTGSKTTTEVLMLPVDTPEGTFQAFIPRETDVEYDVSFACFEVAGEHGEDIPLAVVYHNALNPNFEIDVIDMRTHEPPYRLGEGVRVAVGSPYGCEHGDDVEPGASSMPIGTPYSNPCNPAILQGAHGLGIEGISIHRHFVALQYRAESLPHIAVMTKRAAAEDFLAGRPWRFTELVPHALEDDWDVDESVDEINEERAEIWGKLDAAAAAQGKGSAVHGVSRRAMTSSDGATADRMPGETRRLYSIGVGGNPSYDAPRMRYSFASYTRPGELHDYDPDTGEDRLLKRATVLGGFDPRDYMERRVWVTARDGERIPVSLVWRRDVPTCDSAMFITGYGAYEISSDPGFAVSRISMLDRGVLYAVPHIRGGGEMGRAWYEQGHLLNKKHSFEDFIDATRALQRAGLASPLRTVANGGSAGGLLMGAVANMAPECYAGVEADVPFVDALTSILDPSLPLTVTEWDEWGDPLHDADVYAYMKSYTPYENAPDSENDERTAVFPKIFITTSMNDTRVLYVEPMKWLARLQHAGVDAVAKIEVEAGHGGTSGRYKQWEEVSYENAWCLSMMGIGG

SEQ ID NO: 51 - protein, 508 aa, Bifidobacterium adolescentis
MVCNLAIDAYYGCMADFSHILMTRPDFGDDDREWLHQLVADWQVIADLSFADLLLILQNGEGKYIIAEQCRPSTVMSLRAEDVVGNVVPESLCAELDAAMDSESVFRSSKLRTVGKAKVCNVYAPVRHNGKTLGLVVRETNMATRESNGRYESESISAGKQLYEMIPRGQFPYRNPVMNQRHNARVADGFIVLTVDGIVRYASPNAISCFRRLGSVSTMQGEYLSEIGTKLLHENDPVLETLPLVLSGKAAVDSELDANKAAVSMRSLPLMDANGRVGGIVLCRDVSELRRREKELQTKDATISEIHHRVKNNLQAVSALLRLQARKTKSEEVKKELKEAQRRVQTIAMVHEGLSQTADEIVDYDKVISNLLKMAVDLATMRDQHIDVDFVGKFGMMPAQDATPLSLVLTELITNSVEHGFEGRKEGHITISVGRGGNNLNVVVEDDGTGLADEEHDGMARSSGSGLGTQIINTFVTNDFGGTVHWEPRRGGGTRVVLDMKLRAAQDN

SEQ ID NO: 52 - protein, 320 aa, Bifidobacterium adolescentis
MDRLIEAIEDKQNPSVVGLDPTEALVPKQVVASFAEEIAEQVEDPTEAPAAQLSVAFFEFNRAIIDAVADIVPAVKPQIAMYEALGPAGIDAYSMTCEYAKQQGLYVLGDVKRGDIGSTAAAYAHHLSGVNAGERAFDPWHEDAVTVNPYLGTDGITPFVEAATGADKDIFVLVRTSNPSSSELQELELASGERVYEHIAGLVEGWGAETIGANGYSRVGAVVGATHPEEGKALRARMPHTFFLVPGYGAQGGTAQGVAGMFDKDGMGALVNSSRGIIGAWKKSGKYSESMSADDALDLVAESAREAAKDMRDNLRAVLP

SEQ ID NO: 53 - protein, 692 aa, Bifidobacterium adolescentis
MPLPTEGNAVTSQKTAEFGSAASSVKPIDSHARFIVVGVIVVGSFIALLNQTVMSPALPALMRDFNITTGTVQWVTSVYMLVSGIMVPISGYLIDKFSTRKLFAGALATFMVGTLLCAVAPNFVLLLVGRILQSAGSGVLLPLVAVVPMLVYPPDKRGTAMGMAGIVMAAGPAIGPVVGGLVIDGFGWRPMFIGIAVVALVILVGGTMMLKNVSELKNPKLNVLSVILSTIAFGGLLYGFSSASTMGWASPVVITSIVVGLVAFVAFVYKQVKLDEPLLRVDTLATRNFRNSAILVTLINAAVAATNVTLPIFIQNVLGQSATVTGMVMLPAAAVGIILSPVAGAAFDKFGPRGVGIGGLALMTISLGLLGTINTRTSVLFVAVFCALQASGQAIANMPINTWGVNALPNDMIAHGNAIANTGRQIAAAIATSLLVTAETSVTASHMSQGVKSATASGIAFSYLLCAAISLVALIICIFTVTSRAKEKAARNAKAYEAQASAEVAVETTEGQPAEHHYAGAYVAPASSLFKQTQEQSIGGIMDDHPYSCLDSDDITHVVREFIRLNVSSLPVVNGDGRLVGFVSDGDVMKSIATYESRTVSTGTGSTMVVFDDETVASKVQALSGKKVMDIATRKVVAATPDQHVGEVARILAKKQFKKLPVVDGDGRLVGVIRRKSVMEHAFDALFPKDDR

SEQ ID NO: 54 - protein, 386 aa, Bifidobacterium adolescentis
MNDQPETGITPGGTSGAFRDVLSKDHARRGKPPLHFADMSEEERIGKAKELGLPKFRVKQLANHYYGHFDVNAEEFSDFPAARRSDAAEAFFPELIHEVTRQVADGGTTIKTLWRLFDGSLIESVLMRYPTRTTLCISSQVGCGMGCPFCATGQLGLTRNMSAGEIVEQVRVAAKAMRDGEVAGGSGRLSNIVFMGMGEPMGNYKSVLSAVRQISSMPPEGFGISARNITVSTVGVVPGIRKLAEEGIPVRLAVSLHAPSDELRDELVPMNKRFNTKQVLDAAHDYYLASKRRVSIEYALMRGINDQAEHAKLLAKRLNHYGDDWAHVNPIPLNPIEGSKWTASKPEDERRFLEILHNAGITATLRDTRGQDIDGACGQLAAKERD

SEQ ID NO: 55 - protein, 428 aa, Bifidobacterium longum
MARFTENRWTSAIIPALLIHIPIGTVYCWSVFKQLIADRLHASPASVEWGFSLAIFFLGMSAAFAGPMVEKNIKKSALVSMVCFVVGFAGTGVSIALNFLPGVFICYGAIMGIGLGVGYLTPVKNLMLWFADNKGLATGIAVAGFGLAKAIASPLMEYLIGTVGLVSMFFILAAVYAVMMFVGFLLIKRPAGWVYDPATSHVSRKTILKKPVFWGIWIAFYINITCGLALISQEKDILHDVLRAFPQYANLSPAKFAAAISGIIGLVLAVDSVFNTAGRVGFSTLSDHLKRRETVYQVIFIMSIAVCLLQIFTNSIGNALLWAVLAMLFLVNAGYGGGFSTLPVLLDQHFGTKTVSTTHGLTLSAWAFAGLSGNQLASFVVAHAPDQAHRYAALIPVITGLFVVALISISLVKYLGDRNVTKAVEDRG

SEQ ID NO: 56 - protein, 852 aa, Bifidobacterium adolescentis
MADDTNYGSLGALAPNWDEGERNIDTDEIYERFFTWVEDVKGVEPWPHQEEAIMDLLAGDHVILNTPTGSGKSLVALGMHFAALCTGRRSYYTAPIKALVSEKFFDLVEVFGRENVGMITGDTHINADAPIICCTAEILANQALREGRHADVGCVAMDEFHYYGDPERGWAWQVPLLTLPDTQFLLMSATLGNVDAIADKLEDMTDTDVDIIADAPRPVPLTYEYTLDPLEKTVELAFGKGETPIYVVHFSQDAALETANALASTGVSSKEQRAAIAEAIKGTKFTTAFGKILQRLLRTGIGIHHAGMLPRYRRLVEQLAQQGLLPVICGTDTLGVGINVPIHSVVLTALTKFDGTKMRKLRAREFHQIAGRAGRMGFDTEGLVIAEAPEFEIENAKALAKAGNDPKKLKKIKRKKAPEGFVTWNENTFDKLIDAAPETLVPHMKITHSMVLNEVEQGGDARYRIDRLIDDSAQTPEQKERLHARADEIFQTLFDTNVIETEDRDDGGKDYFMTVDMPDDFALDQPLSPFLLAALELLDPESDTYALDVISMVEATLEDPKQVLRAQERQARDEAMIRMKEDGLDYDERMDRLQEITYPKPLEDMLQAAFDEYRHDVPWANDYWLSPKSVVRDMVETASDFTGYIARYNIARSEGTLLRYLSDAYRALARTVPQEKRDEQLGDIISWLRVVVRSIDSSLVDEWEHAGTDTDASEAAANLAAPGAKQAVVEDRRGLTVLVRNAMFRRVQLMDLDKPDELGALDKDWGYGVHEWEDTLDDYYDEHEYVNIDAKARSGELFILDESKENSEHAWKVRQIIDDSDGDHDWAITGTVDLDATQSSGEVVFFDYSVSN

SEQ ID NO: 57 - protein, 539 aa, Bifidobacterium longum
MSQDNGAHVEDGATTDASLASRAKNPKKSGPKWWLISLIAVIVAVAVVIGVTLAFGGKKDDKSASSSNQYADTVTIGLKLAPTNLDIRNTAGSALDQILIGNVYEGIVARDSKNQVAPAIASSWETSKDGLTYTFHLNKNMTFFNGDKLDAEDVAWSINELIAKGYHDADALAAVSKVEAKDADTAVITLKTPNSNLLWTLTGRAGLVFDKDAKYDLKTQAVGSGPYTVAKFVENSSITLKANEKYWGKNKAKTPTVVVKYLADDNAAVNALKSGDVQVLAPITENLAEPFKSDSAKYTVKAGNGTDKFVLGFNNASGSKLADKRIRQAIRYAINHKELIASRGGADKALGGPIPSLDPGYEDLTNLYPYDQNKAKSLMAEAGYSTDKPLQLTLTYANIYGTELGDQLRSQLKPIGIDLKVNVVEFSTWLQDVYTNHTFDISLVDHNESHDFASWTDPTYYFGYDNKNVTKLYNEGVAATSDKERDAKFAAAAKLVSEDAPADWLFNYRITTATAKGVEGFPFDLNQTVLPLYNVTYTK

SEQ ID NO: 58 - protein, 226 aa, Bifidobacterium adolescentis
MMADNIAGGADPAEINEMCHASAAALLDRVHHTQDAELVERVLTLVDREGVDVIAELWSHADPDSLPGILWRLYLLRTWMRKNRESIARLWRVGEPVATTASAIAGVDQAPTEDDIARTADSILAGAFTGDFAVALERAAAFTDVVALGLRIEARKLASLGGSSEAGSSDVSDGSAASAAAGSHPSAVEKRARAKAAKLMHTAGNLFATAKDFRHGANLWRRGRLE

SEQ ID NO: 59 - protein, 492 aa, Bifidobacterium longum
MVDDYTAKMTELIELMRLIGNDTQQCEVKECKRKISSTITDTLSAFSNGSGGWIILGLSEKNGFTPVEGFDARAMQEALSQACEKMTPVVRPVIVTCPFEGANLVFARIDEMLPRDKPCFTTALGPHGGSFIRTGDGDRRMTSYEVDRLIEEHLQPTYDLDIVPDATTDDLDPQLVAGLLARVREQHPRVFADRDGIDVLLDLQVLRHDDSDESEVGGILRPTLAGLLALGRYPQKFYPRLGISIAVFPGTSRDDVFRGDERLVASKSVVGSIPVMIDDAVDSLMRWIGAKKPDYPPLVLREAIANALTHRDYSPDARGTQVHISVFTDRIEITNPGGLYGMVTHDVLASPHPVTGAPFVSTRNQFLFTLLESTPYPGGGFVNPEGGDGYQRIAAALREAGIEPATTRNDINTFTMTITKQRTMANSSPGDVVKAIMTVLERHSAMSVKEIMRELQLTPLAATSGMRELMKEGRVARVKFADDPAQRYRLKG

SEQ ID NO: 60 - protein, 375 aa, Bifidobacterium adolescentis
MRNSILVRSIAAVSGIVMLASVAACGDNTTASTDSSAKSDTKTETVSGNFSGAGASSQQAAVEAWIAGFQGTNPDAKVAYNPSGSGAGVSTFLTGATAWAGSDAALADNEVEQSKSVCASGTAFDIPVYISPIAVVFNLQGVSGKGKTLNMDAETIAKIFDGKITKWNDDAIKKQNPKVDLPDLDITVVHRSDKSGTTKNFLSYVKDAAGDAWSYDLGENWPNEVGQGAKGTSGVISTVQQADGTIGYADASQAGDLGTVAVKVGDDYVPFSAEAAAKVVDASPLDDSAKGDNRVVVKLDHNTTEKGAYPIVLVSYDVACPAYKDANTAKFVKSWLTYVTSDEGQQTAASAAGSAPMSNTLRQKVVKSIDAIKTK

SEQ ID NO: 61 - protein, 620 aa, Bifidobacterium longum
MTEMRSAKIMSGRVFAGARALYRAAGVSGDDMGKKPIIAIANSFDEFLPGHVHLNKVGRIVSEAIREAGGIPREFNTMAVDDGIAMGHTGMLYSLPSRDIIADTVEYQCNAHCADALICIPNCDKVVPGMLMAALRLNIPTVFVSGGPMEAGTTVLADGTVKSTDLIDVMYATADDNVSDEELLNYEKTVCPTCGSCAGMFTANSMNCLTEAIGLALPGNGTILASHSYRKDLFKRAAKQVVKIAHQYYDDSDDSVLPRSIATKEAFENAMTMDVAMGGSTNTVLHILAMAQSADVDFTLDDIERISHTVPCICKASPSGKWEISDVHRAGGITGILGELDRAGKLHTNVHSIDYPTLEAKLADWDIMRPTCTEEAQQMYKAAPGHIISPEPWTHTTLFDSLDRDRTNGAIHDINHPEIHEGGLAVLRGNLAPDGCVVKTAGVPPEIWKFRGPALVVDSQEQAIEVILNDTLKPGMALVIRYEGPKGGPGMQEMLYPTSFVKGKGIGKQVAMLTDGRYSGGSSGLAIGHMAPEAANKGPVALIKNGDIIDIDIEARSVNVELTDEQLDERRRELEAGDGYVAHRNRHVSQALKAYAAFARSADKGATRDPELINKLSGLD

SEQ ID NO: 62 - protein, 240 aa, Bifidobacterium adolescentis
MTELNNGIQNGAQEVSKLMLKAVFWDMDGTLIDSEPYWHEGELKIAADHGGYWDEDLAWQGSGTPVPDVARRMVEHGCKLSIEEIGKGMIDYVAQKEFERIPWIDGVEDVLLSLKEAGVPSMLVTTSPRHLAENLIAQAPAGTFAGYVCGDDDVEKKPSPAPYLAAGRKLGIAPEDMKYCIAVEDSMSGLRSAAASGATTLGQTGFMRIDNSNGPQFASINGYDGITAATLDAYVRSRNA

SEQ ID NO: 63 - protein, 391 aa, Bifidobacterium adolescentis
MPSLSEETNGRIERLMPGATIGIIGGGQLGRMMALSARYMGFRIGVLDPTPDCPTAQVADFQVTAEYDDIAAIRELAEKSDVLTYEFENVDADAIDQVRSLAAAPQGTDLLRVTQDRVNEKRFINDHGTPTAPWKAVNSVEELEAALDEIHYPAVLKTRSGGYDGHGQTVLKSEADLEQVRARADHDGSFPPSILEGFVDFAFEASILVAGNGKDYVTFPIVRNEHRNNILHMTIAPAEVDETVAKEAHELALRLAKGFELAGILAIELFITKDNKVIVNELAPRPHNSGHYTIEACSFDQFDAHIRGIAGWPLEQPQLLKPAVMVNVLGQHVAPTRALIADHPEWNVHDYCKAEVRHDRKMGHITVLTDDTAKTVADLEATGCWDDLKKA

SEQ ID NO: 64 - protein, 720 aa, Bifidobacterium adolescentis
MTEQTENATRLARPLIRLAKLVGVATSYVGMSHDYHEIEDDVLVAVLGALGIDASNDEAINQSITSIKSERETRVVAPTVLHVVGKESKVEVHGGMFDVPEASITLENGKQFTGKISHEGGEKIAHEINGSFFFMSYLVLPADLPEGYHTLKVTVGSETETATVISAPEKIELLDDMKNGSLWGWMSQLYSIRSKGSWGVGDFEDLKTMLVEAKKKTGSDFMLINPMHAAEPVPPLTPSPYLPISRRFINFSYIRPESMPEYLTLSHEDRAEVDALHEQVESLNDDARLIDRDAMWRVKKHALWVIYKAGRTKARQAEFDRYLAECGDEIESYATWCLCYDKWGAPSDDTDNWVRKYNRDSEEVAQLREKFPDTLEFYRWLEWVATDQLHAAQQAARKAGMKIGIVADMAVGVHPAGSDVWWNPERFAKGATVGAPPDMFNQQGQDWSQPPLNPIALEQTGFRVYRDMVHDMFANAGAVRIDHILGLFRLWWIPEGKPATDGTYVHYDSDVMLGILALEASRAGGVVVGEDLGVVPAYVSKSLSEHGILGCAVEWFEQMDGVFRTPKDWRPYALASVNTHDMPPAAGYLEYGHVKLREQLGLLSGPVEEFQKSATAEHNAMLNMLVEEGYLDKAALDDEAANENEIVDALYRGLKGSPCKLMAASIVDAVGEKRTQNQPGTNNEYPNWRIPLADGEGNVVPLEKLFDEPRLQEITAIMRG

SEQ ID NO: 65 - protein, 190 aa, Bifidobacterium adolescentis
MVESWLPQRAKNAIRGVYGVLGVMAIVLGIALLIWPGVTLKIAAVALGAYFVISGVIRIVTAIVELGLPGGWRVLDILVGLLLTVGGVVMLKNATLSGAMLAVLVTMVVGLGWMMEGVMALVESWHMPSSAWAVIYALISIVAGCIMLFSPLASTGWLILFGGCALVALGIVAIVRAFTFGKVGKSGKKR

SEQ ID NO: 66 - protein, 548 aa, Bifidobacterium adolescentis
MTDIIASPAVKEAVKVVMEQQERLGDEAAAEARESQPIRTSVLRAAQLAAEAEDHARGRQHVKGKLTARERLDLLLDAGSFEEIGRFRGGDINGGRAGSAVITGFGEVFGRKVAVYAQDFSVKGGTLGVAEGRKICHLMDKALDLKVPIIALIDSGGARIQEGVAALTEYGHLFRKTCDASGFVPQLSLILGPCAGGAVYCPALTDLIIMTRENSNMFVTGPDVVKAATGEVISMDDLGGGYVHNATSGVAHYLGEDEADAIDYARTVLAYLPSNSDQQPPVYAYAATRADRDVAKRLATIVPDNDRQPYDVLDVIRCIVDYGEFVQVHELFAASAVVGFACIDGHPVGIVANQPNVNAGILDVDSSEKVARFVRLCDAFNLPVVTLVDTPGYKPGAEQEHAGIIRRGAKVIYAYANAQVPLVTIILRKAFGGAYIVMGSKSIGADMNFAWPSSQIAVLGAAGAVNIIHRKDLQKAKDNGKDVEALRAKYIADYERTTVNANLSLEMGEIDAMIDPEQTRETIIESLRLLASKKRVRRTSKHHGNQPL

SEQ ID NO: 67 - protein, 334 aa, Bifidobacterium adolescentis
MTPVTRKVRVKVPATSANLGSGFDTVGLALDYHDELEFTLSADPVNTAAQVMIEGEGEDTLPRDETHLVVSTFRRACQTFGLGRVGFILQAHNNIPQARGMGSSAEAIVAGIAAAAAFAQDDDLNRDAVFELAAAIEGHPDNVAPAVYGGLTMSWDMETAEGVGSVPIPGGEPMHNGFHTINYRVADDLTAAVFVPDYELSTEKARQALPTEIPFKDAVHNVSRVSLLPAAMNPAMLASGSRQNANALLFAATQDRLHQPYRASLMEPSWALIEKMRSHGFASTVSGAGPCVLVLHHGDAHEELERIAAEELASGHWRVLHLAVDTKGVQVERA

SEQ ID NO: 68 - protein, 548 aa, Bifidobacterium adolescentis
MLHNPIFKGFNPDPAICRKGDDYYVAVSTFEWFPGIPIYHSKDMKHWELLTHVLTDDTKPNLTKLPSAKGIWAPCLTYCEEEDMFYVIYGVMNSMNARYFDVNNYLIKSKSIEGPWSEPVYLTSSGFDASILHDDNGKKYIVSLEWETREGYEKPGVICCVEYDPETKHVVGYPKRIWRGATDRGCIEAPHLTKRDGWYYIMCAEGGTGYNHAVTMGRSRNVWGPYEPDPNGPLVTSQPKESNERADDDHLKPRYFNPDSVLQKSGHGSYVDLPNGETYLVHLTSRPFVPELRCTLGRETAIQKMTWTNDGWLRMADGSNLAKLEVEEPDLPDAPMPEIPGHDDFDGGAIGNWYYSPRQMPTTFANVTERPGWLRIRGEESLASLNRTSLIARKLTSVYATVTTKMEFEPEVYQHSAGLTIYYDNMNNIFLRKYYSQTLGGSAISIVRLENGEKTEMLDTRVAVEDKPIYFRLNIEGRRTWFEWGYDGENWTKIGPDFDTTTFSDEYCKYGEFTGTMVGIAITDAALHEKTADFDFFDYEADETKPVD

SEQ ID NO: 69 - protein, 553 aa, Bifidobacterium adolescentis
MVRRQHGNSQEHVTKHIFVTGGVVSSLGKGLTASSLGRLLRSRGIKVLQQKLDPYINVDPGTMNPFQHGEVYVTEDGAETDLDIGHYERFLDVYLSQKANVTTGQIYQEVLRKERAGEYLGQCVQVIPHITNEIKSRMRAQASDDVDVIITEIGGTVGDIESQPFLEAAREVRRDLGAENCMFVHVSLVPYIAAAHELKTKPTQHSVMMLRQLGISPDALVLRSDRPLNQSIKDKISLMCDVDSEGVVNCVDAPSIYDVPKTLFDEGLDAYVVRELGLPFHDVDWDEWEDLLERVHHPKHEVNVAIVGKYIDLPDAYLSVTEAIKAGGFANWAKVNVKWVAADKCATEEGAAAALDQVDGIVIPGGFGIRGIDGKIGALRYAREHKLPALGLCLGLQSMVIEYARDVLGITDANSSEFDPDCANPVIATMEEQKDIVAGKGDMGHTMRLGSYPAELEEGSIVAELYGTTHVTERHRHRYEVNVAYKDRLREGGLVISGQSPDGELTEFVELPREVHPFYVATQAHPEFKSRPTKPHPLFAGLVKAALDHQQAR

SEQ ID NO: 70 - protein, 493 aa, Bifidobacterium adolescentis
MACVASLTLTSALAFGVGARKSVALTVNGETTTVTTYAMSVDRLLQEQGVKVKTHDLVESTSPTSMLKNHDVVNVQSAYQTTITIDGQEVPFWTVASSAEQLLDFFNQNETEAAKITVNISNVYNKLTGGLIINQKGPVTVIADGKSSVAPNGKLPAASILDAKGITLGKEDRVSVEKDGKTTILRVRRVTHGEETRTKEVPFGTQTIIDPNLQPGEVTVRQEGENGEIQQTYAVTYVDGVKESETLTEEKTTKIAIDKVIAVGPEKTTDDTDKSDKSDNSGNGNGNGDNGDSGKTDDGKNDSGKNDSNKNDNKSDSNKSDSDKTDSNKSDSSDKNNSNNNSNNNSNNTKKDDPAPTPTPTPAPQPTPAPQPKPQPTPQPSNPSAGCRLYHPSAAQAQAYASGAAAQRGWTGQNWTDLVKLWNRESGWSWSAENVYSGAYGIPQALPGSKMATFGANWKDDAAVQIDWGLSYIAQRYGSPSAAWQHSEQTGWY

SEQ ID NO: 71 - protein, 350 aa, Bifidobacterium adolescentis
MELDLAGMHQLAAGQGIDPETLDAALSEALRLAYLKTPHAAKHARVELDPRAGSFTVWAQDEIPGEPTEDDPHPAPTLGEEYDDTPHDFGRLAAATARQVISQLFRKAEDDKVFGAFSGQKGKLITGIVQQDVKDTSNVHVAVGDVEALLPRREQVPGERYRHGERIRVYVVNVARGLKGPEIVVSRSHPELVRRLFEREVPELVSGAVSIMAIAREAGARTKIAVRANTEGVNPKGALIGPGGARVRAVMENLGPEKIDIVDWSADPAKFVAAALSPAVATGVQVISEKNKTAIAFIHDDQLSLAIGKEGQNARLAAKLTGWKIGIESAEAHAKKMAESADHSDGETEE

SEQ ID NO: 72 - protein, 506 aa, Bifidobacterium adolescentis
MARTLVAGVDTSTQSCKVRVTDAETGELVRFGQAKHPNGTSVDPSYWWSAFQEAAEQAGGLDDVSALAVGGQQHGMVILDKQGNVIRDAMLWNDTSSAPQAAALIEKLGAAPAQNGEPEDPIARGKQRWVKAVGSSPVASYTLTKVAWVAENEPENAKKIAAICLPHDWLSWRIAGYGPVAEGEDAHLEALFTDRSDASGTIYYDAASNEYRRDLIAMVLEAAEGAEAAQSHAEAIVLPTVLGPRDAAPVKADPAIAGKNVEGGCLLAPGGGDNAMASLGLGMAVGDVSISLGTSGVAAAISENPTYDLTGAVSGFADCTGHYLPLACTINGSRILDAGRAALGVDYDELAKLAFASKPGANGITLVPYFDGERTPNRPNATATFSGMTLANTTRENLARAFVEGLLCSQRDCLELIRSLGASITRILLIGGGAKSEAIRTLAPSILGMDVTRPATDEYVAIGAARQAAWVLSGETEPPAWQLTIDGVETGEPTEAVYEAYAKARG

SEQ ID NO: 73 - protein, 587 aa, Bifidobacterium adolescentis
MNKKAPHRISEQHLTVLSWSAPLLAQLIMLIVMCMQRHWLYAAMLAPSLLGSALMLITMIMRVRHEETNSNTITGSDSPVPTHHNGNEIDHAQLFADMPSISFEHLHGLDNDPLIWRTIVRNWLVRSPTNGIGMSEHGIFHIDLASSGPHAMVAGTTGSGKSELLISWCMALAIRHSPQTLHFVFLDFKGGSTFNALERLPHTVGNVCDLDLAHAVRALNAIEQELARREALVSAERVSRFDQLSHPPARLVVVIDEFHALRDRLPDYMQRLNRLASLGRSLGMHLIVCTQNPMGQVHADMKANISLSICLRVTDQMQSNELIGTKDAALIPPAFPGAAYCHDGQRTVPFRCSAVHDIDSLVHAINTASAFSGTTNPSPLFSAPLAPHAGKDDLTAPQREAWHHVPFALSDDGVLISTAFLDVGHGNIAVIGACGSGKTNLLLCCASRLYESGRCTIRFTRKTNSEWTTDDGRISPQHERTIWFVDDADELLSPFAAMPEADKLKTALADPSVTVIAAVEKPQSTLLERCLTRVAFPCGERATDVMMGIPSAVLDGFGVDDYAIAGRGVFIQQARACPVQCAEFQGF

SEQ ID NO: 74 - protein, 274 aa, Bifidobacterium adolescentis
MDYQYQTTEQPSSPRKAWPIVLAVVVALIVACGAGVCVYRNKQQEALATCRQSLAEFSSARKAVLDTSENGSELQKLIRGALGVNDIIDAFADAATSAENTVDTEGCKAEATITQLNLVAKTLDSATDSLNASLKSIQEKNAETALQDPKADSDGAAAGQSSNNPSGQSNGASSNSTSSNGTSDTKSLDESKKELQQSIDEADKLVDKLSKDDSLTLTGRKLLSALSKAADSGQKLVESSNIKDSKYYKAAKVTLDEAIDMADNWVNSQAAKAQ

SEQ ID NO: 75 - protein, 402 aa, Bifidobacterium adolescentis
MGNIIDYARTETRDFGELPFREADALVLAQLSYDDVPECVPRLDDIESRYGTLHDRVKQFDPRHPIRSVRMLRKPPFDGVTIARADDELHHGSAVPDHNVENVGLVDPQVTHDFYHAIAANPRFSDIEMGAFLEQFDGDEQTQFAAVTYRLPSGMLVVAFRGTDDSLVGWKEDFNMAFQYPVPAQVTAADYLARVAELWKDVPIVLTGHSKGGNLAVYAAMNAEDGVKDRIERIYSLDGPGFPEAVVNSFEYASVSDRIVKIVPDSSVVGMVLETPERCIVVKSDVEGIMQHFVFSWQMHGGEFDKVEDVASSSVTFNKALNKWLANLSKEQRERAVDALFAVLEASGAGSISAMMAAGPKVIPEMLGTYVGLSGEDRRNLNQALAIMLQAALARNPKVRRK

SEQ ID NO: 76 - protein, 389 aa, Bifidobacterium adolescentis
MGRHQQAEASGIISFMACATLAWIAMDLYLQFAPAIWRVTQRLFTVCAGITAGCGVISFTLGYARNSRSMTLKHGWTIPIRRIFEILALSVVYASTIFVTAFMLLSIASNMMGLRTLKGYLTALCAAISGVVGYVTFVQAELMNAKTIASLLPFFVVSGVSIAGLTSDDPYWYNNNFSQLGDRTTFAARMFNSTLMLAGVCIVIISYFAISELITTHRLQMQYLSASDEKEAPKHFKARILLLSTMLTLAGIAFIGIGMFRYTPHPILHNVFARGLPCLMSVLMIALPWLAPQLSKVVYVISDLAIVIGALAGFQWLAGRNTLTNVEALAGMMFLGWFIIFSRQIAAIESDRVQTQLILAQTKRPESVEDLAEVSETVPGTVSRLSSEV

SEQ ID NO: 77 - protein, 457 aa, Bifidobacterium adolescentis
MSETTNSPTPIEVPVRTKGWQSMVMVVCAGFMCLAQTAFAAQRFGQDSAVYVWMVFCMLVAFAIGFLLLARSRYPRATFVAACVVVLVFPYDPILALMALTALLARRNDMKTTVRAIVAGGFVTLAAQVRDALRPPEASIWHMVFAKPDTGSQYGTDIIMLADDRTIVITAIVAALLELAIATLAGLHIRSRALASLATAKADAADAQVEQLKTTIDSQQLADAIAAEAHDTLAHSLSLLALNASALQAESKKLAAEAGSLDAGQLAGQASRIADKTEEIRKQAAGALDEAHSVIDMLRHPEQAKAQLAPSDETSLTRESLDALLGDARAAGMRLNTWIDIQQLGQLNRETGKIAYRVLQEGLTNASRHAPGAPVSVELTVNPTVGVHAHVSNPTNPSVPAASADATRPAMDSKNAFRTGAGLPGLAERVRQAGGTCRFGFDARHAFHVDVQLPWVE

SEQ ID NO: 78 - protein, 473 aa, Bifidobacterium adolescentis
MEASRSIPPQIPGYTLIKRLGSGSEADVYLYQQLSPARQVAIKISKNTLDPRAAVRFRSEANFMGQISTHPYILSVYENGVTVNGRGYTVFEYAPGGNYKTSLEHGRLTADQMLTVGIDLASALFTAHRKGIIHRDIKPSNILINAHNMPMLADFGIAGSVYGRPGVGFTIAWAAPEVLAQGGGGNESSDIYSLGATLFAMLIGQSPYEYFYADVLGDSQRQVRAERLKSVILNNPLPKLNRPDVPAEVERVLRKALSRTPEDRYYSALEFARDMQRVQQALYGRAVQTTVEGVPDYPQNMYAQTSAFDQSAPVAKQHARWAKPLAVTVAAAAAVVVMALAFVTVVMPNMDASSDNSKVQVQNHGAQNHAEDDPDSAITSGSVPSVQDLTGEYTADGKVRFTWVNPSPKDGDSYAWSLVGDSGTDPNAQGTTTESTSIEIDPADGAQTCVQVSLVRADRQMSENPMIACAAKP

SEQ ID NO: 79 - protein, 466 aa, Bifidobacterium adolescentis
MLGMGNMRQWLMNISLVGGWFPAAAFAVIAVLSVTLLVSAAVSKRDGRILATVLPIGVAAVSGMVGYVVAWLLSDVFVVFGVGLGSRVMSWVAAGFAIAGFAIVHIVLSRGMMRVAAAILTVFAILAAAIGIDQSYGEYATIGSLFGEDSYSQADLTGLAKRKDLITVAQWRKQAANGTIRNIPANGTVNKIDIPATKSQFEARKALVYLPPAALADSKRKPALPVVLMLSGQPGSPGRVFQAGGIQTMMDGYAKTHDGLAPIVIAADQLGADSHNTLCVDSKVYGNALTYLTQDVVDWVKTNLPAAQDAKDWAIAGFSQGATCSLQIGVNHPDLFGTMIPTDSEIKPTNGSRQEMIDRFFDGDTTAYENQVPVNAIRNHAPTHQMLIIGAGEKDTTSIRNVKTIAPVAAKAGMRVAAVESSGNAHDWHAVQDVLRYGLAVFGHDTGLDGANPNLSDYPNLKRITI

SEQ ID NO: 80 - protein, 304 aa, Bifidobacterium adolescentis
MRGPLTYLYCCSYEGENVHDPNPIDVAAQASGEPTFREVGVGPWSQTHPGEPRPDDASSPNYDIRFDSTLLDEGDRRNVLDRYRYWTVAAIKADLDSRGRHDFEVAVENWTHDFNIGSMVRTANAFQARRVHIVGPHKWNRKGALMTELYQHVENHPSITELVECWKLRIAGEIAAAQSQAAAIAFHMRGSAAATDGTSGTAPNTSETMAQLEALDAKIAELQAARVIALDIIPGAVPMETYHFPERCLMLFGAEGPGLSEKALELADDVVYISQFGSVRSINAGAAAAVSMHAWIAQHAAPQA

SEQ ID NO: 81 - protein, 722 aa, Bifidobacterium adolescentis
MTQTQQTESAERIARPLIQLAKLNGISTSYIDQLGTYVEIRDEVLVSVLAALGVDASSDEAITASYAATQQRIADTLVEPTVVKFIGKEAVTPIRAKGNDVALKLTLEDGTEYAGDLTAYLTGSNADDGSLQLTLPDDIPAGYHTLAVDAGPMHAEAALICAPARIELPPAVAEKQRWGWMAQMYSIRSAESWGVGDYGDLKLLLSDAATKSHADFMLINPIHATAPVPPLEPSPYLPESRRFLNVTYIRPQDIAEYAELNEADQAEVARLHAEVSPANDSIEPLDINSAWWHKRQALQLVYNVPRSVERQAAFDAFKEAAGPDLRAFAAWSVAFQVWGAPWEGTWFKDTNRDSPEVVKLMREHADMVDFECWLQWIADEQVTAAQNAARDSGMALGLMQDMAVGVHSLGADVWWNPERFAVGSVTVGCPPDFYNQQGQDWGQPPFNPNYLAKTGYGVYREMVHNMFSHAGAVRIDHVLGLFRLWWIPQGEGARGGAYVTYDYEAMIAILTIEASRVNGLVVGEDLGTVPDYVRTVLGEHGLLGCMVEWFARVDDSPNAGDPYADPSTYRKYALASVTTHDLPPTAGYLQFEHVKLREQLHLLSGPVEEFQASATAERDAMMDRLVESGLITPEVAGDVEGHIQEIVEAMHKMLLKSPSVLLQAALVDGVGETRTQNQPGTSSEYSNWRVPLAGPDLKVVHTDEVFDLPRVQSLAAIMNGEK

SEQ ID NO: 82 - protein, 849 aa, Bifidobacterium adolescentis
MTTALSPAQRYAAFKQTQAKRQSVSSRFARSMPFELDDFQVKANDALEAGDNVLVAAPTGAGKTVVADFAIYLAQERNVKAFYTTPIKALSNQKYHDLVETYGPDRVGLLTGDTSINSEADIVVMTTEVLRNMLYEHSMTLDALRYVILDEVHYLADRFRGPVWEEVIIHLPQSVRIIGLSATVSNVEDFSKWIESVRGDTTLVVSEKRPVPLEQHVLVQADDHTEPELIDLYRRDKDGNQTDKLNAQLVSRLDQLDRKAAKRRGEQRPDRRKGGKGGKWNDHSRRPERHTPRRWAVIDELNFLGILPGIYFIFSRNGCDQAVEQCINAGLELTTDDEVRRIRRIVDEMVEGQLSQEDLKALHFSQFRFALEEGFAPHHAGMVALFRQIVERLFEEGLVKVVFATETLALGINMPARCVVVEKLEKFDGTGHVGLTPGEFTQLTGRAGRRGIDTIGHAVVVDHHGFIPATAAALSSKRVYPLHSSFKPTFNMAVNLLNSSDYETARITLDHSFAQWEANESAWQLEAQMDTLRKALDGYERAFDCEFGDFKEFMRLRMRLSDLEKNERRKLKHEVFRTQKARSEAFKDLDRRIAELREKDRDHPCRKCPDIQKHLKWGHRWAREMRELERVQHRYDSRTGSVARQFDRICNVLNELGYLDRLDEGAKEHIDYRLTERGQLLRHLYSELDLVLAQAIDDGAFDGLDATELASAVMSLIYEPRRGSGGEPRHYPGGMQGNVAVCAAQLKGVHASIAMLCEDYALDEPRQLDFGITDVVYEWAQGESLSRVLYGTDLTGGDFVRGCKRLADVLQQIAVAGPYLGKRAETLAPIAKQAYENVNRGIVAYSGVD

SEQ ID NO: 83 - protein, 159 aa, Bifidobacterium adolescentis
MAEEKTILLTQEAYDKMKEELAWREGEYRDEILSKVSAARAEGDLSENGGYQAAREAQRVNQGRIDELTVKLRNAKILTAPKAGEVGDGSLVTLEVNGREMVYVLGTRDLSIATDYSIISPESPIGAAINGAHAGDTVTYTAPNGREISVTIKEAKPLA

SEQ ID NO: 84 - protein, 308 aa, Bifidobacterium adolescentis
MTEEGMTENVNEHTQGHLLGAADIRRIAADAGISPTKKFGQNFVIDPGTVRRIVREAGVTADDHVLEVGPGLGSLTLAILETGATMTAVEIDPPVAERLPKTIAEFMPDAVDRFRVVNRDALTVNPENLPDFKDDDSFTLVANLPYNVATPILLTLLERFDNLGTFLVMVQKEVADRLSEKPGSKIYGTPSVKLAWYGTTERVGVIGRNVFWPAPNVDSALVLFKRYPGGHTPAADNADGSVVDRETVFRLIDAAFGQRRKTLHAALKKIVPSEAFEKAGIDPTRRGETLTIDEFVALARALDEVFAS

SEQ ID NO: 85 - protein, 804 aa, Bifidobacterium longum
MDTMASYTRRAHSGGNGPALRQPRTAQSRAGHSAQEGPYTPQESRSRHASHKASNSHRAPNRKKKNTGKGKHRVLKWVLGIFFSLIGLGLLAGIAVFAYLYTTTEVPQPEKFALAEKTTVYYADGTTAIGSYAEQNREIISCEGLPDYIGNAIVASENRTFYTDKGLDLKGIARAFINNVTKGTRQGGSTITQQYAERYYMGETTSYVGKAREAIMAIKIAQTESKDEVLCNYMNTIYLGRNSYGIQAAAKAYFNKDAKDLTLSEAAMIAGIIPSPSTWDPADNADMAKSRFKRVLNIMQEDGYITAKQHTDAKFPQTAAVAQQNEYAGPNGYLLDMVRRELVQSKAFTKEDLDTGGYKIITTIDKSKQDLMQSIGDTRLDDMPESLQIGGIALDPKTGEVLSVYAGSDYLSKQLNNADQAVFEPGSTMKPFALLGAAQSGVSFDTLFNGNSHQHFTGLDQEVNNALENNWGNINLYQATANSVNTVFMNVNEHLTPKRTAAIAHEAGIQGDIDENSMYNVLGINALTVWDLAQGHSTIANNGVKNTLHMVSKVLDSNNKDMYNAPSNGTKVFDANDCALVQKAMQGTTTYGTAAGTSSMLGRPVAGKSGTANDEMASSFVGYTPSMMNVWAIWNPDDKGNPQVVPAFSGYGVSSTGYPAHLFQEFMAQALQGTEAEQFPTAKDNGKIGGSDGTWGLGKGQSSGLSNNTNKQSTEDAQKQAEQDAQQKAAEEEAKKQQQAQEFAQQCLANPSYSTECPNYPGTTTGGDGNAGNNTGGDNGNNTGNDNGNSGGTGGNTGTNGVTQ

SEQ ID NO: 86 - protein, 368 aa, Bifidobacterium longum
MLLYGGRHSRSAVDNRARHTICRWITGSRRLSYSHFSVLPLCHRGMRYARRMNGYSEVPHNGEINNYLRKDLDAKATAKNTACWNLLGKVRTKRTLCFSLYTALELCGVELPRHSTLPQKDFYVTVRSKGTRSSLDNVDYRIWNAKFNSIAFSNGVTCMHPMDAWIQFAQYLNLTELVVLAEALIRRYGYAIEQFTQRLTAFHRVIGRARCEAALKLVKPSDSVQETRTRLALMLFGLPIPQTQYGITDSENGYTYTVDMAYPQYKVAIEYDGDHHRRFRKQYVRDQQKRRRLRQLGWTVIEVFADDLWNTAKQRAFAQEVATAMQIPLPGRPQPSCRVLIDGSLTINARKGEYRRRKQAKHNKASQH

SEQ ID NO: 87 - protein, 610 aa, Bifidobacterium adolescentis
MGMWECSENIRPAHTLDLNSVSALHEHDENTERVDSSAKAVSKFHTHSIPLDMEDIERDWDKPVTEAGIAAKASVIVRVGMLDLGAGTGSFRVREMMHRIAYPLGVHVRADVNLTDIEASCTDGKDRITEVVDLPTTGVNTERIWLLEHFADWFNVNLGKGSMYHSQSDVSEGLMQHLDKRDASQVSAELSKQLKERQKAEQNQEGSDDPVLDALEMVTERAQEGDSTARPLHMRDIEAAAAAGRSNGDSVAEKPRKNRNCKPPKEYAEHFDHIGKAAGESQGVTVRQVHERLDMIERRKPLYSPAFAGLASACACASFVFLLGGGPYDMIGAFVGAGLGHWLRRRLFAHHLNQFFVTFVCVAVAALACTGMLRLIGLFDPIALQHDTAYIGAMLFVIPGFPLITGGLDMAKIDFPSGVQRLTYVLCIILMATLAGWMVASIVHLNPQGFEPLGLNPVINCLLRMLFAFIGVWGFSVMFNSPQRMCLVAATIGAITDTLRLEIVDLGVPAEAGAFIGAFLAGLLASAWRSAVRHGLLAPHLGYPRICLTVPSIVIMVPGLYMYQAMFHLGQFDTLNALDWAFRAFMVIICLPIGLAMARVVTDKSWRYDI

SEQ ID NO: 88 - protein, 449 aa, Bifidobacterium adolescentis
MSTVEAAAGKAQAMVRDSVKTVIAASMVGTAIEFYDFYAYGTAAANYFPKVFFGDTTNPTVALLASLLTFAIAFIARPLGSLVFGHFGDRMGRKTTLVVSLLTMGIATFLIGCLPTYNQWGVAAVAVLCLCRFVQGIGLGGEWSGAALVATENAPEDKRALYGSFPELGAPIGFFLSNGTYFLLETFNDNDAMLAWGWRVPFLLSSILVIVGLVVRVQMEETPIFRMAQEQKKVVKSPLAEVFKKSWKEVIQATFLVAVTYTLFYTLATWSLAWGTKTVEQGGGNLGFTNQEYLLMLMIAVCVFAAFIVISCVNADKFGRKRVIIISSCCLIAFALLFPFLLDPAVVGQRNFATNLLFLCIGFALMGTAFGPIGAFLPELFDANVRYSGSGIGYNLAAIVGAAFVPTIATWLSHHWGVHSVGLYLGVMALCCLIAVLSCKETKNVDFTK

SEQ ID NO: 89 - protein, 434 aa, Bifidobacterium longum
MFFLRMITRSFTRQLRRRLLIALTVCLSATVSVSMLGVVFDVGDKLNAELSTYGSNITVQPKADAVVSDLYNTESGGATSTSDPTAFLKESDAAKIKTIFWSFNITSFAPQLNIHATVNGTNVPVVGTWFNKNLKISTGETTVVGVEGMRSWWQLDGKWPKDDSDQGVIGKTLASELGVTTGDTITLNKTTASGKKNEQKIKLTGVYDSGDEDNGSLYIASSTAQVLADLPDSVDKIEVKALTTPENDLARKAAANPAALSQEEWETWYCTAYPSSIAYQIEEVIPGAVAKQVRQVAALQGNVLQKTQAVMILMTVLSLIAAAVAVANLMVASIGERSGELALLKALGATDAAVSRLMLAETAAISLLGAIVGALLGSGVAQLIGRVVFGSGITMRPMVFVLVFVLLAVTVLLASASSIRSILNLKPAEVLHGR

SEQ ID NO: 90 - protein, 308 aa, Bifidobacterium adolescentis
MSTIDSPAIGTATINAVSVDCPAKTNLTLHVGPSHAEWGGRHELDTIYCAVGVYDTVTTTRKAPGSGFSLNLEGAYLGDLASSGSDMRRNHAVLALFAMAEASGHEPDVALNIDKRIPVGAGMAGGSADAAATILALNTLWDLDWPIERLQEVAATLGADMPFCLTGGYARGTGFGERIEQLDDDGDIVRDLTERGFTGHLLVGAYRAELRTPEVYATFDQIGAGDGDENHLQKAAVSLHPRSGQAIEEALRAGASQAFVSGSGPSVIAFVPTEDAADAVQRAWQDSRCVDRIIATNAPARPIVHITA

SEQ ID NO: 91 - protein, 601 aa, Bifidobacterium adolescentis
MMTIEQTWNNGGYLSGLKGVTIPNNTPSFNEDPRKGRHWSSDNAIQADDESLKGIFASLNSMPTVSQQDVQIPDPQPVSQSQPSEQSVAQQQTTQAIQQSQEAHVFPTTSDRQPVGTGSLQFDEDTDATQQNPAYEEHGPIQQIDSNPPSFVPGATPFAKRQTDIAETAAQQMPPTITHIPQDAAFQRPQPQQQQMCQPQPQTRPFADFVVPETNDADEDAVPEERKIKAEQVEQTLRTEHPDADDEFVSAIRQLVKLNASDLHLVINDPPMLRVDGKLRPAKGLSVWTKDHTYEAVKVMTNELEMERFKDDLELDISFAIGDLLRFRVNVYRDRMGVCAALRTIPTEIKTAQELGIDPRIADLALLPRGLVLVCGPTGSGKSTTLAAIVDKANAERADHIITIEDPIEFVHQHKRCVMSQREVGTDTKSFAEALKRALREDPDIIEVGELRDLETISTALTAVETGHLVFATLHTQDAGSTVDRLIDVYPENQQQQIRVQVASTLRAVIVQTLIPRASGHGRAPATEVMINNPAVAALIRSGKAHQIRTVLQSGEKEGMHTLDQDLARLVNKGVITFEDALVKVQVREEFEKLCGARKSF

SEQ ID NO: 92 - protein, 990 aa, Bifidobacterium adolescentis
MSDTEKSAQAQPNESVEPSFRYNAKLAQGIEEKWQKIWDDEGTFWAANVNGDLKDGKGHNAEGRPSYFAMDMFPYPSGKGLHVGHPLGYLATDVVSRYHRMKGENVLHAMGYDAFGLPAEQYAVQTGQHPRITTEQNIANMRRQLHRMGLSFDNRRSFATIDPGYVRWTQWIFSRIYDAWYDKDATNPSGSKGCARPISTLVEQFESGKRAIPGFEGKAWADLSEAEQADVLNDFRLAYISKSPVNWCPGLGTVLANEEVTAEGKSERGNFPVFQRELRQWSMRITAYGHRLIEDLDTIDWPEKVKLMQRNWIGESHGASVHFDVETPNGVKDMEIYTTRPDTLFGTTFAVVSPEHHLLENVPAEWPAETPEDWKGGYATPVEAVKAYRLAAEAKTAKDRVDEAGEKTGLFTGLYAINPITGAKLPLFTADYVLMDYGTGAIMAVPGGDQRDYDFAVKFGLPVIYTVKPLPESGDDLANYEGKAPFVSHDGIVINSSIDATKAKGDSLSLDGLRVDEAIDKVNAWLESAGVGKGTVSYRLRDWLFSRQRYWGEPFPIVYGEDGAPHLLPDEQLPINLPDVPDYSPKTFYPEDAESNPEAPLSRNEDWVKVELDLGDGKKTYYRDTNTMPNWAGSCWYYMRYLDPTDTKHMVEKDEFDYWMGPDHNKTAGKSGGVDLYIGGVEHAVLHLLYSRFWHKVLFDLGYVDSMEPFHKLFNQGMIQAYAYTDDRGQYVPAAEVVEGPADANGEPTFTWNGQHANREFGKMGKSLKNIITPDDMYENYGADTFRLYEMGMGPLAESRPWNTRNVVGSMRFLQRLWRNVIDETTGEVRVTDGELDTKTLKLLNNTIADVTVEMEAMRPNTAIAKLIVLNNHLTSLDAVPRAAVEPLILMLSPIAPHICEELWSKLGHTESLAHADWPKADERYVGQDSVTAVVQIKGKVRAKLEVSPDIDPKELEKMALEAVADRLGGKEPRKVIVKAPKIVSIVPAE

SEQ ID NO: 93 - protein, 458 aa, Bifidobacterium adolescentis
MFAAEGYELALVGGPVRDLLLHRKSHDLDFCTSARPEQFEHILRRFGHDGFWDMGRKFGTLGAMRRREDGTEVKVEVTTYRSDTYDPDSRKPEVNYGDTLEGDLSRRDFTVNAMALRVPELEFVDPFGGANDLAKGVLRTPVDPRQSFDDDPLRMMRAVRFVAQLGFRIEPETAEALSDMVDRIEIVSAERVRDELVKLLLSDRPRAGIEALVDSGLADIVLPEIPALQLEIDEHHRHKDVFEHTMIVIERAVALETGPDGPVPAPDLTLRLAALLHDIGKPKTRRFEAGGKVSFHRHDAVGAKMTRKRLKALHFDHHMVEDVSELVNLHLRFHGYVEEPWTDSAVRRYVKDAGPLYERLNRLTRADTTTQNKRKAMMFSAAMDEMEQRVRDLKEKEDFDAIRPDLNGDEIMQLLSIEPGPMVGKAYKHMLEYRLDNGPVERDVAVAELERWYKEQGE

SEQ ID NO: 94 - protein, 320 aa, Bifidobacterium adolescentis
MKRIPLKDTERYTVERFKQGKKTERHLAWLKSRKAGVGGSDMSTILGLNSFKTPYELWLEKTGRVEPEDISDKWAVVRGNALENELRKRFRAQHSELLVTDGTDKQFISREKPYLRASLDGILQKENGDFGILEIKTASGRRAGDWHDEDGNLRIPPYYLAQVEFYALVTGWTWGYVYAAIGDDEPVEIPFEADVEDMAAIDKAATDFWHFVTTGTPPQLTGGDVQKAFPEPTPDIVDESDDDDLYDLLARYESATGMLNDTKSAQKELQEQIILRIGSHTGIKCGNLQATYKPMTRKEYTVKATTYRKFTLKTIEEKEQ

SEQ ID NO: 95 - protein, 339 aa, Bifidobacterium adolescentis
MPVLSTDTARLNGMPKPSAATTPFHLVYGGDSYLNDQTVRDLKHEAQRRYPDAETIELDAANADHYAFDEAVSPSLLADRAIVIVTNLQNADEKLGDAMVSYCRQACKEPADACIVICQHEGGVKGKRLVEQLTKAGAYKDAVADLKKPEAKLNFVMQCFERRKRRVEPMAAQQLVAVLGDRTGELAAMVGQLCFDFDDNPMTLDRVNQYLTSNPQVDGFRVADLALSGRTADAIIAMRSSVEQGTAPIALIGALAMKLRTMAKASAVRAGTISTAEAKTNPWVLKNATRQLSGWTSSGMSACIQMLAWADEQSKTNGSDPVYALERSIELISRKGRAA

SEQ ID NO: 96 - protein, 262 aa, Bifidobacterium adolescentis
MAYQRFSLFPDSPSFKDLFSARSLRYRWRNGDPVITTAIMAICIVVWAIEAVLFLVWPEGGNAFVNAGMLLPATAVRHPWTFITSMFLHQPTSLWHILFNMLTLWCVGPVLERMMGHWPYLALYVLSGLGGGAGLMVWAVCSPSGWMTAAYGASGALFGLFAAILVVYRRIGIDIRSMLIWMLINFLMPVITPGIAWQAHVGGFIVGGVLAWLLVTGLHAFRGKSLTWRTTVYGITVFVVVVAIIVGCNAGNPLMHMSLLYQ

SEQ ID NO: 97 - protein, 1844 aa, Anaerostipes caccae
MDIQKYINELAEKEIVIWCEGDSIKFKAPKGAMTEENKNKLRQYKSEVLDYLKAHNNLVFTSDTKRRYEKFPLTDIQNSYVMGRNRLYELGGIGCHGYIEIEVNRLLDPGQLEVAWNKVIQKHDMLRAIVSASGYQIVQEAVPSVEIIVLDGRDKDISADKEELRTELSTKQYQLGTWPMCDLALSIEKDKSIIYFSLDMLISDFASMNVMLNDLERFYENPHEIIIPTTSYRDIVLYQEKRKTFNSKSRQEAEVYWNKKISMMGDAPNLPVIGMEDNQEVSFLQKKVFLNDKQWKAFVELAKSYNITPSVFVMAALAEVIAVWSGDKKFCINTTLLNRPEVAEDIYKVVGDFTDVNITAIDIEYSETFLERVKKLQMDLWSDLEHKDVSGVEIIRRLTKERKKNVIMPVVFTSTLGVSSKDDTTVKNRIVYKLSQTPQVYIDCQAAEENGGATINWDVRNGVFEGYIIEEMFGSFALLLQSIADKNSEVLKEKYPVSLMKETLEIRRDVNNTFKNIMPAMLEDGFLKSFNLYPDKTALITDEGEYTYRSLGGYVNAVLRILGEAGTQDGDKIGIDTKKHVWQVAAVLAALISGATYVPIDVQQPDKRKEKIIRSADIKLLFAEAGNEDLEQYCNVVDIHSLKPEPTESLPIDKIDYDRPAYIIFTSGTTGEPKGVIMTHRATSNTIADVNETYAVGERDVFLGLSNLSFDLSVYDLFGCFSAGGTLVLPSTDKIRDSKYLSELIIRHRVSVINAVPALHQMIVSYLESANVSVDYQVRLLLLSGDWIPVTLPHRIYDLFGDCRVISLGGATEAAIWSISYDISKKAVFTKSIPYGYPMSNQTFYVLNNEMQPCPNGVDGSLYIGGIGLSSGYLKDEQLNREKYPALPWSGERIYRTGDKGCYLPDGVIIFKGREDGDNQVKIHGHRVELAEISSVLNEHPLIERAVALALGESPEDLHIDAVISPVRKKTVASPALDDKEEYLLKSIKQYYEEQMDQDLLEKWIKKSEEVVSADIYNTFRKRGIFSDKSKAFNFEQIVEMMSIPEKLHKLTKRWLQVLVNEGIITCEANAYKASEISTDLGSEKLWKEFFEIEDDFQYSKEFVDYLKESSDLLPELIQGKEDPLNILFPKGDTDPALAAYHDNKVNGMLNNIATKEIRYLCEKKNKKSPEKPFRILEVGAGVGGTSLDVIPELEGCNVEYYFTDLSVFFLNKAQENFGKYNWVKYGIFNINEDFVSQGYEAFSFDVILCANVLHNSRNINSVMKNLKGLLSEDASIIILEETRTSYLLLTSMEFKDGLTGFTDERSEHDQTFFTRKQWEDIFKRHDGQLLYEFPDKGSKLDLAGQTIYVVRFAGEYEQLEKEAVRGYLESTVSPYMVPNQILILPDMPLSANRKVDTRKIKEYFKSWDHKENIKKKDELPQTDLERRIAEIWCKELGITSVGRNDDFYLVGGDSLLIAQIIGKMMENISEASGWEWSNLLTEMMKAPTIKQIAESLLNHQNDKGNLEDPSLMILKNSSLNNEDSVAKVFFHAGAGTLTPYTDLLSRIKEDSKDSESIIGFVFGNDAEYISMETSQTFRLLGRKYGEILEKMGYKNYILVGHCVGGLIALETAQYLRNKGISVSDVTLISTGIPKRKENTILADASDEIFRNALHSSLDNELLLERIFARVIGADAYKAGYQVSDERLQQYIEYISRCGSGEITVKALCETGGEYEDVAEEFRRLASYTISERLNALYRTIERPNGELMEHQLKMLNVLFRIFSQNFRCVSSYIPKLYYGNIRIFCCEILGSHFYPGFFEEDFETWKPYIKGNLKYNTIAGQHFDCIIGDNLEKNISKILDFNY

SEQ ID NO: 98 - protein, 626 aa, Bifidobacterium adolescentis
MSLKHPSDKPDAARPESVEPVTLSDRGNAVINPTADPSPDAASQANGLTDELAHESADDAGETDDTGKAAGANAQSSETIGIFGARKDTFSARYHLTRRGKLRRLAQIAQIANKFDVVHGLTPVKMRLMLEALGPTFVKVGQILSMRSEILPQSFCDELSKLRADADPMPYSTVLQVLEDEYGRPVDEIFDHIDPTPLGSASLAQVHRAKLLTGEDVAIKVQRPGVRETMAQDVSIMRTIAGIATKTMRSAQVVDLSGVVEELWDTFESETDFLIETRNLAEFKRFCERYKYMDCPKPYPELCTEHVVVMDYVEGISVSHPDELLAAGYDLKEIGTKLVDNYATQVLDEGFFHADPHPGNIMVRGGQIVLLDLGMTGRLNAKTRSVLKDMIFAVAEQDSPKLADGLLRFAGAEADPEDYPALLADLDVIVKEFGTVDLAELDIAAMLTALTQMAQRHGIEVPSTVTTVGRALVTLEGLLDEFIPDVNMIQIISDHIASSTSKKDFAKDETKSLALESHQALHSLLAAANELKVASRMLTRGQLRVNMEMVGSQEPIHLLANMVNRLTMALIVVGLFIGSSIVYYAGIKPVIFGIPIVGFLGYVIAFILSVWIVFDIYFKGRDSKKR

SEQ ID NO: 99 - protein, 339 aa, Bifidobacterium adolescentis
MRNTAKKATVRLSDIAKETGYSLSTVSKALNGRADVSEETRQTINAVLKRYGYSRKATSTKSQRIIEIVFQDFDNVWALEVLRGAIREAKLHDLNVITTEGGNRQHPDSSWIDNMLRRQTDGAILVFSSLTRIERNKLHSRGIPFVLFDPFGNPDPDTLSVQADNWTGGVIATRHLLALGHTRIGIITGPEEMMCSKARLDGYTSALAEHGIETDPELITEGDFTTSGGYAQSISLLKQPNRPTAIFAGSDLQAMGVYEAARQLGLRIPEDLSVVGFDDVQTAAFLGPALTTVRQPLQDMARAAVRMLVEALSTDDVIQPHIIMPTSLVVRNSTQQLEG

SEQ ID NO: 100 - protein, 446 aa, Bifidobacterium adolescentis
MSLGLNILLIFIFLLLGSVFAGTELALVSLRGSQIDQMEQEDARGKRVAQIARDPNTFLSTVQIGVTLCGFLSASFGESSIAPYIVPVIEDWGVPHNVAAPLTTIALTLIISYCSIVISELVPKRIAMQRNEQIARAVVPAIHVFAKVCKPIIWLIGKNTNGIVRLLGFDPNETDSEVSDDELRVLVNTNTNLSKDERTILDDVFDASETIVAEVMRPRADVAFLDGSMPIAEAAAYVREMPYSRYPVTGKDFDDVLGFVHVRDLLDIRDSKARTVADVTREGISLPGTSKLLPSLELLRKRGIHLAVVIDEYGGTDGIVTLEDMTEELVGDIRDEYDLPEEKGGERTERAAFVNGVATIEGGMTIEDFADLTGIELEDGPYETVAGYFLAHTGKMGEVGDVLSSDDGYDMVVTEVDGRRIETLEVRRHTADEDGSAAGDSAADAK

SEQ ID NO: 101 - protein, 401 aa, Bifidobacterium adolescentis
MDGMNELTIGFSASATKQEQLSELMEQIMGAYSVSDDEGPLTDAVEVFLKKQPHLTVRRHGDTLVASTDFGRERRVILAGHLDTVPVIDNFPPKWLQPGDPLIREDVAAGHEHERVIWGRGATDMKGSDAVMLYLAATLTDAKYDLTYVFYDHEEVAAEKNGLRKVVESHPDWITGDFAIIGEPTDCGIEGGCNGTMRFDVITHGVAAHSARAWMGKNAIHAAAEILNRLNAHENRAIEVDGLTYQEGLNATLISGGKGTNVIPDECRVHVNYRFAPDKSLAEAKALMIGADAGAKLGNGEHQATGGVFEGFGIEMKDESPSARPGLNSPLAQSLVSLVKERTGRDPLAKLGWTDVARFAILGIPAVNLGAGSPLLAHKQDEQLPETDLLLMADLLEDWLR

SEQ ID NO: 102 - protein, 313 aa, Bifidobacterium adolescentis
MMSSPSSEEVNAQRSDFGLRLSNSMAKYGPLCVGIDPHRQLLTDWGYNVDALGAELYSMRMLQAANGRAAAVKFQSSMFERYGSKGIAALERVLYAARQMGVITIVDCLHGGLPTTISAFADAYFKPGAPLLADAITLLPYYGARSLGGVINDALNNGRGVFIASLTSNQEGASLQTAIRQAGEYKGKTVAYGIASTAQKFNKGNDGMGSVGLIIGATIGQWINDSGVDPAKFTGPILSPGYGWQGAETRDLKTVFKGTKGNVLVTVSRSIATHGPDIAKLTEATASVARDIRQALTEAQNESADDAADGDVE

SEQ ID NO: 103 - protein, 470 aa, Bifidobacterium longum
MRMYAAPSSEGAALISPAIFGAIWVETGNAAHCGLLLFFMSDELSPEVFDAVCRQADQAARAQERLAQANTEAKNELLLAIADALDEHAADIEAANALDMLESKENGMDAGKLDRLLFDVPRVAAAAQGVRHVATLPDPVGEIVRGYNLPNGLRLTQTRVPMGVIGMIYEARPNVTVDVASLCLKSGNAALLRGGHAAERTNAATLGVIAPVLEAHGFESALVQSVDQYGRAGATAMMEARGHIDVLVPRGGAGLIQAVVRNSKVPVIETGAGNVHIYIDKSGDLAKAIPIIINAKTQRVGVCNAAEKLLVHKDVAAEFLPQIAAALAEANVVLQTDTTSYGIISGAAIEGLDLNHAAEEDWDTEYLALKMGIKVVSDLDAAIDHINTHSTGHTESIIAEDYAAIEEFTKRIDSAVVMVNASTRFTDGGVFGFGAELGISTQKMHARGPMGLREMTTTKWIGYGTGQVRA

SEQ ID NO: 104 - protein, 409 aa, Bifidobacterium adolescentis
MKTITLTPDASGMVDWPTLSNDKKSVVTIGSFDGMHQGHQAVIRRVAELAEQEQAFSVVVLFDPRPALVHAYAAKHDGQEPPAGTPDTQALTSVDERLRAIDAIGVDYTLIVRYTMAFSAKSYRFFLGQMVGKLGMRTLVLGSDAAMGANRAGNVKAIENLALATGVFQLEVVDDFGPGLTRVPVNAKPVMPSEPGEPSDPLEGASKAERRAWSKKHQAKEVRTWSSTNVRYLLSQGRIKDADAILGHAHAVEGTVVHGEERGRTIGFPTANLSENVAGYLPVDGVYAGWLVDLGEKSADGGEEAGEKPADGVSQQYDASSVNARVAMQSPHRWPAAISIGTKPTFNEDGDAERVVEAYAITDDWLDLYGHQARVEFAGFLRPQIKFDSADDLVVELKRNVEETKRLTA

SEQ ID NO: 105 - protein, 431 aa, Bifidobacterium adolescentis
MTDDPKLLAEPREGVPNVIDTLPAFRDYCSELASSHGSLAADAERASGFRYGHEDWLVQFKRDGAGIGLLDPQALAAAGADWNDFNRAVGDAVWILHDSLQDLPGFDELGMEPQRLFDTEIAARLLGLKRFGLAAVTEHFLGLTLAKEHSAADWSYRPLPRDWRNYAALDVELLIELETKMRAELKRQGKMEWAQEEFDYALKEGLGPRKEHLIPWMHVSHITEVMRDRQALAIVRALWTRRDELAREYDIAPTLLLSDSSIIEVAKRKPHNAAQFRSIRSINERVRIHTDSEQDKMFERYAPIQRKIKPSMWKNIIQDALALPPSEWPDVDGGAARRHESQSASAPKSIRVWKERYPERLQVLNRVRKAVSQIAEDTRTPVEIVIKPQYLRNLCWTDEPRKRDVARFLSEQGARDWQVSLVAESVSRAIM

SEQ ID NO: 106 - protein, 390 aa, Bifidobacterium adolescentis
MSVTFAQGFSAAGVAAGISAVEGKKDLALVVNNGPLDAAAGVFTSNRFCAAPVQWSRNIVSDGHVKAVILNSGGANACTGKPGYEQSKATAEKVAGLIGAKAEDVAVCSTGLIGELLPLDNVLSGADKAFETLADTAEAGADASHAIMTTDTKPKTVELEGSNGFRIGGMVKGSGMIAPQLATMLCVITTDAVVTAGQLQAALNAGVEMSFNRIDVDGCMSTNDTVLLLASGASGIEPDPDEFNELVAKATASLARQIIGDGEGASHDIRVKVTGATTEEAALACGRAVAASNLLKCAISGNDPNWGRIVSSLGTVPPDVAPYDSEKVTVDVNGVRICENGGAGRDRSEVDMTPREVHIDIDLNAGEAEATVWTDDLTHEYVHINADYES

SEQ ID NO: 107 - protein, 801 aa, Bifidobacterium adolescentis
METQTLEGVATETENAPEMVKVLVEKRDGRVVDFDPINIISAVKSAFADLDKKIGPQEERLIRDIANQVEAEIKDRYNGPAKIEDIQNLVEHGLIEDHLYDVARTYTNYRLNKDIERAKATDINEAVRRLVDRDEALVRENANKDSNVYSTQRDLLAGAVSKASAFSMLPDAVSNAHMKGDIHFHDADYSPFTAQSNCSLPNYWDMLANGFTLGNAPMGSPNSISIAATQITQIMKDVASSQYGGQTANRADEHFAEYAKKDYDKFLEQAHEIMPDDLPIEIAERQVRMAKAVEPKRLHFEKDRPALPMDEPFDKTSDRLQQLREIWAKIQTRKAIYDAMQTMEYQINSNRVSNGQTPFVTVGFGLGTDWFAREIQRAIFLNRIRGLGSEHHTAIFPKLVFTIKHGVNADPGDPNYDLKQLALECATKRMYPDVIFYENIVKITGSFKAPMGCRSFLQGWIDPKTGKDVEDGRMNLGVVTVNIPRIALESHGDKDRFWKIFDERMTVAHQALQFRIMRCKQATPVNAPTLFRFGAFGRLGANDSVDQLFRNERATVSLGYIGLYEATSVFYGKDWMRDHDWDPEGKEFALSIVKRMNELCKDWSTAEGYHYSVYSTPAESLTDRFNRMDREKFGEVDGVTDHDFYTNSFHYPVWLQPTPMEKLDYEKDFPYYASGGFINYCEFPCLQANPKALEAVWDYAYTIGIGYLGTNTPIDRCYECGFEGDFEPTEEGFKCPECGNSDPDRCNVTKRTCGYLGNPVQRPMVHGRHEEIAHRVKHMSGETGHVTLDDGSEREWFEEAK

SEQ ID NO: 108 - protein, 248 aa, Bifidobacterium adolescentis
MAVVDEAKLRYLDFLSREDRVRHHRYVEEMKQYDMMRSGDINAIAESTRLWDSGLYGYLSDDPLKNAKYRFVTTITLATRFAIEGGMDEEDAYNASDLYIQNLENCKTPDDVRRLHTDMMTFFTWAMADMQKAETHSKAVNECLDYIHYHLHEKITVPILAEHVHLNPTYLSELFKRETGTAISQYITDKRMEAAENMLKYSEYSFDEIAQILAYRSQSHFSKVFKKHSGMTPGEYRTKYAQNGIWPE

SEQ ID NO: 109 - protein, 225 aa, Bifidobacterium longum
MSEINAESTTMPPVELRMPRASEREEMLAGKLYNSVDPELNALREKAGDLCARFNAASRTDHAARAAILDELLPGHGAGLDVMGPIFFDYGCNITIGERVFANFNFTVLDCCPVTIGDDVLFGPNVSLLPPMHPLRWQDRNVRQAPDGSAYDCEYGKPIVIGSNCWFGGNVTVIGGVTIGEGCVIGAGSVVTRDIPPHTVAVGNPARPIREITDKDASALQYYAQ

SEQ ID NO: 110 - protein, 375 aa, Bifidobacterium adolescentis
MASNESAVLFDQPGPKGRKTIRIVNWIAGIIFAVVVVLILMRLHNPPDGENQLSWELWKPALDAEAWTDFYLPGLWATIRASVLAVVGAVVFGLVFGVGRLLPSLLIRTISGAIVEFARAVPVLLLMIFFWRWFAFAGLPSPAYWAVVLALVIYNGSVVAELVRSGVGNLPNGQREASLALGLTRTQSLLQIEVPQAIYAMLPAAVTQLVVVLKDTALGSIIMYTDLLQESRRLGSMYFNILQTLVVAAVVYFIVCWLLSRLAEWLPSRMQQHTAAPAEPEPVAPIAIMDPSNVNQIAVAKEGVPLGGAQRVYHVHHRGTNASIHQWRQTRYAQGFDETHPESQVKFDKNGHPIKDNPFKTKGDGKDKNKSEADE

SEQ ID NO: 111 - protein, 403 aa, Bifidobacterium adolescentis
MHISRLALDHYRSWDHCVLDFEPGINILQGSNGLGKTNIVEAVEVLSTGSSHRTSSSLPLVEKGHPSATVRANIEDAGEQRTYEITIAARGANRARVDGGKSQYMRDIVGLVPSVSFTPEDQRLVSGDPATRRNFLNQAASLLLPRYAQSLQQFTHVAKQRAALLKQLSDGSGIDPEYGRQAVLSGLEVWTGQFIALGVQLTKDRNDVIGLLREPFTRIYASLAGEEEQADLVYEPSFDEVLLFDEPAAEISRHFQRIYPGEVARGQNLIGPQRDDLTLRLNDMPAREFASNGEMWTMALALKMALYEVVSAQRDVKPIVILDDVFAQLDESRRGQILDFARRQDQVLITVAAASDIPQGEAHVIDVAALRAQSQETDGDIAAMAAMLAAGRGAQSQGIEAES

SEQ ID NO: 112 - protein, 395 aa, Bifidobacterium adolescentis
MDLYEYQARELLEEQGIPTPKAIFAQNSHEVAEAADQIGYPNVIKAQVKIGHRGQAGGVKLAKTRDESILASEDILPMTIHKHKVSGVLVAEAKNILHEYYVSISVDRSSRDFDVLATANGGTEVEEIAKEHPESVKRLHIDALDDFDLEAATKMAESIGFYHADVDQAAQILLKMWRCFKENDATLVEINPLAKIGDPDDESSKSLCALDAKISLDDNASFRHDGWKRFTDPIHVDPYEQKAREHGLHYVHLKGSVGVIGNGAGLVMSSLDAVSGAGEDQGTNVKPANFLDIGGGASAEVMSNSLEIVLSDPQVESVLINVYGGITSCEQVAKGILEALDELGSSKPIVVRFDGNAAAEGLNILAQAGRANLHVAQTMEEAAQQAARFAAKEVR

SEQ ID NO: 113 - protein, 428 aa, Bifidobacterium adolescentis
MPGIVLIGAQWGDEGKGKATDLIGTKVDYVARFNGGNNAGHTVVVGDESYALHLLPSGIISPNTTPVIGNGVVVDPEVLFQEIDGLESRGVDCSRLLVSESAHIIAPYHRVLDKVTERFLGKHKIGTTGRGIGPAYADKINRVGIRVHDLFNAEHLHDKVEASLHQKNQMLVKLYNRRPIDVDETTDELLKLGERLKPYVANTSLALNKALDEGKTVLFEGGQATMLDVDHGTYPFVTSSNPTAGGACTGTGVGPTKITRVIGVSKAYVTRVGEGPFPTELFGEEGEWLRAQGHEYGVTTGRPRRCGWFDAVVNRYAAQVNGLTDIVLTKLDVLTGLKEIPLCVAYDVNGERRDDMPTDQAEFAAAKPIYESMPGWDEDISQVHDFNDLPKTCQDYVKRLEELSGCRISVIGTGPQRDHIIQINSLID

SEQ ID NO: 114 - protein, 675 aa, Bifidobacterium adolescentis
MSDLSALNLEAGSLVGGYTLISRLGSGAMGSVWRVRDDGGHQYAMKILRDSLSDDDSPQQQRDELTARERLRREAMALQKVRHPGVCGIVDMELDDALAFIVTELIEGKNLREDVRVNGRYVGDDLERLARKLIEAVRAVHAAGIVHRDIKPTNVMVSSTGPVLVDFGIAMGEGESHVTRTGLVMGTPGFIAPEIIDGAESDEMTDWWSVASVLAFAATGEPVFGTKPMMTVLERAAAGSANLAGLPAGTMAAFRSALNPDRTKRCTPDDLLQAIAVDALNPQAWVAADNGGAADGDTEAMPPFVESPDNPRTLWQSQDDITGENAIGTRTMPRLSEATQAIGQPDVSATQVIGKQVTSQSDASATQVIAPVDDAETSVLSDALPNVGSTRAMPTGTQVMPQSMPSTQMLPAQNAWNPAEAPTQVDPTIKPALQRIAMRQPPSVIPQATVAAAQQSPAMSFPPVPGMDGPNVAEAPNPADVKRGAMLGRGMLPCALMAIPVAVCGLFSLWTAMAAALLFACALATIGFNTEAQLEREGKRGGEKKSSDWLLRLAGLPWHIVKGFGVAIVRTLIMLAVAALGLSLTTVVLQLPYAVMDTWIFGLTIPMPTLLGGPLSESGLAQAAFCAIGWLVAVAAPGAIVLRLGGGALRKQPYLRHLSELPTQSQGNTEFPANR

SEQ ID NO: 115 - protein, 467 aa, Bifidobacterium adolescentis
MGTTLAEKVWADHLVRKGSDGAPDLLYIDLMLMHEVTSPQAFEGLRLAGRKPRHVDQLIATEDHNTPTVDIDRPNPDETSALQLSTLEKNCKDFGVRLCPLGDADQGVVHAFAPVLGLTQPGMTIVCGDSHTSTHGAFGAMAIGIGTSEVEHVMATQTLSLKPFKTMAVNIEGDLPKGVTAKDIILAIIAKIGTGGGQGHVIEYRGEAIKKLSMDARMTICNMSIEAGARAGMIAPDEVTFEYLKGRPHAPEGEMWDKAVEYWKTLKTDDDAVFDKEVTINAEDLEPYVTWGTNPGQGVKISGVVPDPASFNDETERSAAERAIAYMGLKPGMRIKDIAVDTVFIGSCTNGRLEDLRVAASIMKGHHKADNIHRVLVVPASSRVRLQAEKEGLDKIFKDFGAEWRNAGCSMCLGMNPDKMVARERSISTSNRNFEGRQGKGSRTHLASPAVAAATAIRGTICSPADL

SEQ ID NO: 116 - protein, 334 aa, Bifidobacterium adolescentis
MAQINVAILGAGRIAQSMAETLVKMAADDRYRDLVAPYAVAARDGERAAAFAAKYGFPVSYGSYEELVADPNVNLVYIATPHNFHAEQAILCMRAGKGVLVEKAFGANTQQAREILDVSDETGMLCTEAIWTRYMPSRGMIDDIIASGVIGEVQAIDANLCYPTTAKARITDPALAGGALLDVGVYPINFIDMIMHNAPIARVESSMQPYETGVDAHNSMTFYYQNGVMATAQSSILCHSDRMGAVWGTEGYLTCQNINNVEAIDVFDGSHAVTAHYDVPEQLTGYEYEVASAAQAMLDGRTECDEMPHSDTLRIMECMDSLRADWGLKYPFEA

SEQ ID NO: 117 - protein, 438 aa, Bifidobacterium longum
MAENNKKYRFETLQLHVGQEQADPATDSRAVPIYATTSYVFHNFDHAEARFGLADPGNIYGRLTNTTQGVFEDRIAALEGGTAGLAVASGAAAVEYAVRNITQSGDHIVAAKNIYGGTFNLLRHTLPRDGITTTFVSAENPQEFEDAIQENTKLVYFETFGNPNADLPDFEAISEIAHKHHLPVIVDNTFATPYLFRPLEHGADVVVESATKFIGGHGTTLGGVIVEGGKFNWAEVPGKFPTLTEPDPSYHGLNFYEALGGAAFVTRVRAILLRDTGATLSPFAAFLLLQGTETLSLRVERHVQNALKVVEYLQTVPEVESVSHPSIPGRPDHDLYEKYFPNGAGSIFTFDIKGGKDAARVFIDNLHLFSLLANVADAKSLVIHPASTTHSQETLEELEDQGIHQGTIRLSIGTENIEDILDDLKGGFEALRASGLAK

SEQ ID NO: 118 - protein, 363 aa, Bifidobacterium longum
MSDSAIATSSTTPAKAKTKKNRLSGSFFRFVLTRFLLIIPTVFILVTIVFFVMRATGDPISAALGGRLTPAELQQRIHAAGYDRPLIVQYVDYLGGLLHGDLGTTLTDNQPVISILTHYGAATFELAFLALIVALIVGIGLGRLAARKRDRAADAGIRTFAILCYATPVFFLGLVLKLIFAVWLNILPASGRSDLNSEMQFTRLVSPTGFYIIDAIQLGDMNVLVDVLRHAVLPAVALGLLTAGVFIRLVRTNVISTYNSGYVEAARSRGVSEKRLLNKHAWRPALIPIITVMGMQIALMLAGAVLTETTFEWKGLGFMLSQYLKARDFVAVQGIVILIAIIVAVVNFLVDVIAALIDPRVRY

SEQ ID NO: 119 - protein, 341 aa, Bifidobacterium adolescentis
MLSFENDYSCAATPEIIARLAETATNQYPGYGTDDVCESAKAKIREACACPDAEIFFLVGGTQTNQVVIDAITPPYAGVVAATTGHVNVHEAGAIEFTGHKVLTLPHHDGKIDADELDEYCATFYADGNYTHMVFPGCVYISQATEYGTLYTLAELEAIRKICTKYDMPLFIDGARLGYALTASGNDVTIEDIARLADVFYIGGTKVGAMFGEAVVFTHGNMPKHFVTIVKQHGALLAKGWLLGLQFDTLFTDGLYLRIARHANDAADRIRKVLVERGYTLTFDAPTNQIFVTLDNETSERLQRDVRLGFTEKADDTHTVMRICTSWATTDEQVDELVALL

SEQ ID NO: 120 - protein, 199 aa, Bifidobacterium adolescentis
MKYAGAGSFQRNRPLLSFAAGYAGRMADYSFRIATQDDIQAITDIYNAAVIRGGSSADTTPRTYAQRKAWVESHHDPYAVFVTTVPATDAATEGGERIIGFSALSVFYDRAGYDGVTDLAYYIAPEWQGRGAGTFTLAKLLDECRNRHMRKACGIIFADNRGSIALMKHFGFTQFGLMPQAATDSTGTMRDMSYWHLDL

SEQ ID NO: 121 - protein, 638 aa, Bifidobacterium longum
MTQTNNLYDVVVIGGGPAGLTAGLYLARARYRVLILEKDDFGGQITITNEVVNYPGVGRTTGRALTQTMRQQAQDFGAEFLSAEATGLDVDGDIKTVHTSRGDLKTFGILIATGASPRKLGFEGEAEYAGRGVAYCATCDGEFFTGKEVLVVGGGFAAAEESVFLTKYASKVTVLVREPDFTCDAAVAAEAKNNPKIDVRYQVELKGVTAGQGGLREASILNLATGQTETWKPADAGTFGVFVFAGYVPATDLVRGVVELDDHGYVVTHDYLRTSVPGVYAAGDLRVKNLRQVVTATADGAIAAVELERYAKQMSEKTGLVPPRPTASAYEESEAKAASAASAAGTTPAPAPAKRSADAAAAASAAKKPGELFSAAVKQQLGVVFGRMTRPVTLALELDGTPLSAELQGFIGEMVALSGGKLNSVAVDAAGLITAVDGASVPTSLVVGEPLSVTLPDGTELPTYGSLDDSGRATFDVAGVLPLARPTVRICVPAEGDGKAGKDGNGSLVFTGLAFHGVPSGHEFNSFVLGLYNAAGPGQPLGDDLVERAKSITDPLNIMILVSLTCTMCPETVLASQRIASLSPAVRAEAYDVSHFPELKDQYGAMSVPCIVITHADGTQQVEFGKKSIPQMLELVGA

SEQ ID NO: 122 - protein, 401 aa, Bifidobacterium adolescentis
MAKERFFNLPVLILIASSFMLGMSEFIVVGILPDIAADLKISEVTVGNLVSLFAFVYAPVTPLGSALSARFPRFATHLTLIGIFLAGNILCAFAPNYAVLVVARIMIALVSGTLVAVAMTYAPDVTTDRFRTKFIAWVFSGFSIASVVGVPVGTWVANTFGWRWAFHMINVLTIVLIIGMVMVLPRNSHIVKIGFLPQFRLFFDRRIQLGVLDVVCGAAASYVFYTYLTPIMRDEVHVPEQYLSVGLVIFGAACLWSNLYGGKLADRGRGVEPLTHIRPIYCAHAVLMASLVVAHWVPVYGALLLVVLGMFMYLQNSASQVLYMDVASQSHPGSLNLAASLNSMSFNIGIAIGSAVGGLINGHFGLMWLGPVGALFLVCAIAITTFLRPFVAQERDFYADI

SEQ ID NO: 123 - protein, 948 aa, Bifidobacterium longum
MLQIKSISKRYKTGDFVQQALDKVSLNLRDSEFVAILGPSGSGKTTLLNIIGGLDRYDDGDLVINGISTRQYKDRDWDSYRNHTIGFVFQSYNLIPHQTILSNVELALTISGIGKADRRERARKALEKVGLGEHINKKPNQLSGGQMQRVAIARALVNDPDIVLADEPTGALDSDTSVQIMNLLKDVAKDRLVVMVTHNPELAEQYATRIVNLRDGVIRSDSDPFVVDETAEQPAVYKTMGRASMSFATSLALSFNNLKTKKARTLLTSFAGSIGIIGIALILSVSTGVNTYISDIQRDTMTAYPITVDSQTFDLSSMMGGQMGGDDGYGGKTHKTDGIYPDDRSVKQASSLTSSITENNLTRFKKYLDNSKSEIHQYVGSTGIQYTYDVKFSVFDHDPDGTLVNADGVTIGSSDSASMASQMASTSSSGMSGTSSITSQQMSMLTGKTDENAAPDSFNEIMPGADDSKLVGKVITDNYQVVNGSWPKSKDEVVLVLDDNNSVPLTTLYELGLLPASDYHEMMSKLNAGDKVSTPQDKIDYAKALDQTLYMIPASDQYVKGDDGHYRFIGNDKDEIEQRLETATKLKVVGVVKAKKDASATPLAAGVGYARALTNDLIDRAASSAIVTDQKANPNTNVLNGMTFSPSDDATKVADARTYVASLGVTQKANMAKSMMSAGQQSGTGASDAAGAGAAGVAGAAGAGDQAAAMAAMSEQQLADSFDAYIATASNDVLVAIYDQYVSTGTYDDNLAAFGVVSRDAPSSINIYADSFEDKDHIADAITDYNNTVSKKDKITYTDYVGLMMSSVTTIVNVISYVLIAFVSVSLIVSSIMIGIITYISVLERTKEIGILRAMGASKHNVSQVFNAETGIIGLCSGLLGVGLTVLLNIPINAVLHHFIGNADVNAALPVTGGVVLVILSVVLTLIGGLIPSRKAAKQDPATALRTE

SEQ ID NO: 124 - protein, 904 aa, Bifidobacterium adolescentis
MADENNSNEDGQFVPDGSMEPLSPQEADNTDYGLMVGERVQKKDLQQEMRESYLAYAMSVIVDRALPDVRDGMKPVHRRVIYAMYDGGYRPDRGYSKCARVVGEVMGKYHPHGDSAIYDTLVRMAQSWSMRYTLVDGQGNFGSPGDDPAAAMRYTECRMAPLAMEMVRDIDKDTVDFLPNYDGKTQEPTVLPARFPNLLCNGSSGIAVGMATNIPPHNMREVAEGVHWALDHPDASREELLDNLIRIIKGPDFPTGATILGHKGIEQAYRTGRGLITMRAVVNTEEIKGRMCLVITELPYQVNPDRLVVSIREAVRDGKIQGIADMRDETSGRTGQRLVLVLKRDAVPKVVLNNLYKHSQLQQTFGANMLALVDGVPRTLSLDAFIRHWVNHQLEVIARRTAYLKREAEERDHILQGYLKALDMIDEVIALIRASESAETARTGLMDLLDVDEVQADAILAMQLRRLAALERQKILDEHNELMRKIADYNDILAKPERQRKIVGDELDEIVAKYGDERRTKILPYSGEMNVEDLIAEENVVVTVTHSGFIKRTKADEYRAQHRGGKGIKGAKLREDDVVDHFFLTSTHNWLLFFTNKGRVYRLKAYELPEGSRDSKGQHVANLLQFGPDETIQTVLSIPNYDVAKYLVLATRSGKVKKTALAEYDSPRQGGLIAVRLMTDENGENADELIGAALCNADDDIILVSKQGMSLKFEANDEQLRPMGRQTAGVQGMKFRDGDELLAMDVVQGDSDRDLLVVTNEGFAKRTAISEYRLQGRNGYGVKAVQLAEGRGSLVGAVIVEESDQIMAIMKSGKVIRSNVAEVKRTGRTTQGVTLAKPDKNDEIISIARNEETDEDDAEQAAAENGAVQNDAAVQSQAETTTENSAETGTEATSDAGDGENVEA

SEQ ID NO: 125 - protein, 292 aa, Bifidobacterium adolescentis
MSEHIFRSTTRHMLRDSKDYVNQTLMGGLSGFESPIGLDRLDRIKALKSGDIGFVHSWDINTSVDGPGTRMTVFMSGCPLRCQYCQNPDTWKMRDGKPVYYEAMVKKIERYADLFKATGGGITFSGGESMMQPAFVSRVFHAAKQMGVHTCLDTSGFLGASYTDDMVDDIDLCLLDVKSGDEETYHKVTGGILQPTIDFGQRLAKAGKKIWVRFVLVPGLTSSEENVENVAKICETFGDALEHIDVLPFHQLGRPKWHMLNIPYPLEDQKGPSAAMKQRVVEQFQSHGFTVY

SEQ ID NO: 126 - protein, 395 aa, Bifidobacterium adolescentis
MFRDVRVTFTRYLSLSQKKEYSMAYSHNAPFRADVVGSYLRPAELKAAREDFAAGKIDAAALKAVEDKAITELVAKQKAAGLHVITDGEFRRGWWHFDFMWGFNGVDHAAAAHRVAFHDEVTPADTATVTGRISGENHPFVEHFKFVKQFEDENTVARQTMPSPAQTRFVLTGNAAAYPYDEFYKNDDELTADIVAAYRQVIADLYAAGCRNVQFDDCTWTRLCDASVRERLGWSDEDALRLQQENLDVINAVIADQPDDLVINTHVCRGNFHSTWLSSGGYAPVAAKLFGEENVDAYYLEFDDDRSGDFAPLAEVSGDKKVVLGLITSKKPDLEDPDTIKARIQEAAQYIPLDRLCLSTQCGFASTQEGNKLTEDQQWAKIALVQSIAKDVWGE

SEQ ID NO: 127 - protein, 184 aa, Bifidobacterium adolescentis
MANYPASQPGSKRHTLSVLVENRPGVLARIAGLFARRAFNINSLSVSPTERPDISRVTVTADVEEVPLEQIIKQLNKLLHVLKIVDLDPETTVERELVLIKVAADESNRSDVLEIVRLFRVRVVDVNPESLTIEATGAEGKIDALLGLLEHYGIIELVRSGAVAVTRGPKALSEKVLGSEITGR

SEQ ID NO: 128 - protein, 420 aa, Bifidobacterium adolescentis
MDTNVIIAIVAVVVIAAILVIGGWCLGKTRKNAVNKSTEDAKAAADARLAAEAKSAAADPSTVKPSVDSNVDAAEKAPAESQQKSSAQASSSETAAPAPATEAKPEPVHETPESAGTRMQRLKARLSKSGNPFGKALFNILAKDQLSEADWEDVEDTLLLADVGAEASEQLVEELRNDARIAGQSDPAEVRAALKDKLLKLVGTDTDRRLNANKEGANKPSVIIMVGVNGTGKTTTAGKLSRLLVSEGKQVMLGAADTFRAAAADQLETWGAKVGVPVVRSDKDGADPASVAFEASAKAKEENADVLIIDTAGRLQNKANLMDELGKIRRVTEKNLPVDEVLLVLDATTGQNGMTQAKVFAEAIGITGVVLSKLDGSAKGGIVISVQKELGVPVKLVGLGEGPDDLAPFDPEGFVDGILA

SEQ ID NO: 129 - protein, 511 aa, Bifidobacterium adolescentis
MSTTELVKLSAAEMAAKIKAKEVSSRELVEAHLAVIESAEPSVKAFLKVSADQALEQADAFDAKSDEDKAQMPELAGVPIAIKDMIVTKGIETTAASKILEGWVPPYDATVIEKLKAAGMPLLGKTNLDEFAQGSSTEHSAYQTTHNPWDTERVPGGSGGGSAAAVAAFEAPLALGTDTGGSIRQPGSLTGTVGVKPTYGGVSRFGAIAMASSLDQIGPCSRTVLDSALLQEVIGGHDKRDSTSIPEGPRPMVAAAREGMKRDLKGLKVGLIKELGGEGFQPGVMARFNEGVKKLEEMGAEVIEVSLPHLPYSLGAYYIIMPSEVSSNLARYDGMRYGLRVMPPAGVPQTAANMMAYTREAGFGDEVKRRIILGTYALSAGYYDAWYGSAQKVRTLIIDDFKKAFEKVDVLVGPTSPVTAFKFGEKTEDPMAMYAIDITTIPANLAGVPAMSIPAGLSDDGLPVGFQFLAPQQRDEVMYKPAAALEAALEESWNGPIWQSLKTPWLDGLDK

SEQ ID NO: 130 - protein, 551 aa, Bifidobacterium adolescentis
MSSPTGAHGEADATKQENEQQPQSTASTDATLNARAKSSNGAKSQGPKKWLIALIAIIAAVAVIVAIAVTCGKNDDANTSGVTKADTVTIGLKLAPVSLDIRHQSGSAIEQVLIGNVYEALLSRDSDNKVQPGLAKSWDISKDGKTYTFHLNQNMTFSNGDKLDADDVAWSINQLKEKQYYNANQVASLDKAEAVDANTVKLTLSTPDSNLLWYLTGRPGLVFDKNAKYNAKTEAVGSGPYTVESFDSASKMVLKANAKYWGTAHKPATQNVVIRFLTDDNAAVNALKSGDVDVLSPVNATLAKSLDASTYTVSAADGSDKFVLAFNCTNAKLKDKRVRQAIRYAINHKEIIASRGNVDYALGGPVPSVDPGYEDLTGLYPYNVDKAKELMKEAGYTTDKPLRLTLTYANTYGTELGDQLKSQLAKIGIDLKIDYVEFSTWLQNVHANGDYELSLVDHAESHDFYKWTTPDYYYHYDGKQAQELYAKALEATDEADSAKYLKQAAKAVSEDAPADWLFGYRVTVAVDKHVQGFPSKLSQTVLPLWRISKNK

SEQ ID NO: 131 - protein, 891 aa, Bifidobacterium adolescentis
MVSHRKPAKPAFDPRTVKENIVETPLNEEMSKSFLEYAYSVIYARALPDARDGLKPVQRRIIYQMGQMSLNPDRPYMKSARVVGEVMGKLHPHGDSAIYEAMVRLAQPFAMRLPLVDGHGNFGSLDDGPAASRYTEARMAPAALGMNADIAENTVDFTPNYDNKLQEPTVLPAAIPNLLVNGGSGIAVGMATNMATHNLGEVVAAAKHLMRHPDATLEELMRYVPGPDWPGGGVIVGRKGIREAYETGRGALTTRSVTHIENVTARKKAIVVTELPFMVGPERVLERISEGVKNRKLDGISGAIDLTDRHNGTRLVIEIKTGFDPNAVLAQLFKHTPLQDNFTINNVALVNGRPHTMGLKEMLQVWVDHRRVVIRRRSEFRRKKALERLHLVEGLLLAMVDIDEVIQVIRSSDDAEAAKTKLIAVFDLDEIQAQYILDLRLRRLTKMSRIELEAERDDLKRRIEELERILASDEALDGVVIDEMDDAVAKYGTPRRTVLLDEDEEGNLTPVVAHGDDGVSANAMAAARAAATVSSAAADVAAAAKAAKKAGDENATASALQIDDEPCAVMLSATGLIARTSEDAVERWENRSASDGRAKDDQIVSMFRTSTRSSYGLVTSAGRLVLAHVVELPKVSADGPLSVTGGVKAEELLGMTENTDPIRGERVIAAIDMPSTDDGGQLVPLALGTRNGVVKRWNRESPTTMDSWSVIDLKDDDEVLAAAEARDEDRLVFVSTDSSLLTFEAKNVRPQGRTAGGMAGIRLAEGCSVAAFAVVPDGKVTWNYEEGENGLFSASGAVVLTVAGDSEALPGTENGAAKVTPLEMYPTKGRGTGGVRSQRFLKGQDTLILAFVGAYPLHASTQSGAPVELPKPDMRRDGSGTDLSAPIAVVG

SEQ ID NO: 132 - protein, 609 aa, Bifidobacterium adolescentis
MIKEYTRPLEQGIDSDKNIFSVLEERVERTPDDNLVEYKNAQGEWVAFTAAEFKNKVVALAKGLIARGVMPGDSVSIIAHTCWQWTALDVAIMSIGALTVPVYETNSPAQVKMIFNDANVKMAFAEDDFQRDKIESVRDQCPDLGDVYVIGLGAIDTIIEYGRAVSDAEFLEREQAVKGSDLATIVYTSGSTGTPKGVELTHANFVFITYSGVNSMPDIAMKPNRRLLLFLPLAHVFARYMQFFCFAGNVSLGLSSNLKTILADFKAFKPTFILAVPRIFEKIYNAASQKAGAGFKGRVFADATQTAYDWSHAQQSGGSIPLALNAKHALYNKLVYSSIMEVFGGHVEYAVSGGAPLDSSIAHFFNGVGLPLLEGYGMTETCAPSSVNPTEGYKIGTIGLPLQGVTMGVDEEGELCIKSPAVCAGYHNNPDVTKQQIVDGWLHTGDLGSIDDDGFVSIVGRKKDLIITAGGKNVSPCEMEASIMTSPVVSQCVMIGDRKPFIAAIISLDLAETNLWLESKGAEQVADLDEASKNPIVRAEVERAVNKANELASRAESIRKFEIVPDEFTEENGLVTPSMKARRQAVVEHYRTLIDKVIYVPRKPEAHAE

SEQ ID NO: 133 - protein, 478 aa, Bifidobacterium adolescentis
MVYASGGINRRISLATKETTVNTEQTDLTEKTTSGKKASTRKPAAKKSESSKTATKTSRKTAAKKTSAAKKSKKAEEEENLIEQDAPEDDPVEDADLDDFDDDLDDVDDEGEGDDLDEDNIDEDDDSELEDDDEDKRKKPEEPKEKGAFVVRDDDDDDNLTPSGNPKRRVIAAGATADPVKDYLKQIGRVNLLNAEQEVDLSERIEAGLYAQHLLDTESDKMDFKRRRELKWAANDGKRAKDHLLEANLRLVVSLAKRYTGRGMLFLDLIQEGNLGLIRAVEKFDWKKGFKFSTYATWWIRQAITRAMADQARTIRVPVHMVEVINKLSRVQRQMLQDLGREPTPDELARELDMPVEKVQEVQKYGREPISLHTPLGEDGDSEFGDLIEDTDAIAPSDAVAFSLLQEQFKQVLETLSPREAGVIKMRYGLEDGQPKTLDDIGRVYGVTRERIRQIESKTMSKLRHPSRSQTLRDFLDQ

SEQ ID NO: 134 - protein, 502 aa, Bifidobacterium adolescentis
MEHMDATAEAILDGLDDAQRMAATAVRGPVRIIAGAGAGKTRTVTRRIAYACATKAWDPRATLAVTFSVKAAAEMRNRLSQLDVASDVKAATFHSAALHQLRRIWPDVCEGPMPFISRNPREIVEHSLRRVTTQQVDDDTVRNLQAEINWCKISLIAPEDYERVCAAIHHQPPAGLEPSQFVDVYKAYETEKINRNEIDFDDILLITCHLIESDEDVAASIRSGITWLTVDEYQDVSPLQHRLLTRWLGDNRNICVVGDPAQTIYSFAGASSYNLLNFASEFGPLTADVRLNNDYRSTPQIVNYANRVLEASPQRADYLKLNSKRDPGRRVSQTVYNSDLEEARGVAARIRRLVDEGASPGDCAILTRVNAQQKILCRALGEQHLRYRVKRDSGWQNSALADDAQTRLAMLEALGAGGDVKGVTISTIHASKGLEFKHVFLIGCSEGLIPYGSPHEGDLLEEERRLMYVAVTRAEDTLDVSYARAREDDGSDRGRRKSRFFR

SEQ ID NO: 135 - protein, 611 aa, Bifidobacterium adolescentis
MTKALRMSTMFLRTLREDPADADVVSDKLLQRACYLRKAAPGIWTWLPLGLNVLNKIENIIREEMASIDAQEVHFSGLLPREPYEATHRWEEYGDNIFRLKDRHEADYLLAPTHEEMFTLLVKDLYSSYKDLPVTLYQIQTKYRDEFRPRAGLIRGREFIMKDAYSFTLDKEGLVKAYMDERGAYERIFNRLDLKYVPVHAMAGPMGGFESEEFLAPMEIGEDTFAQSPSGKAWNVEALTTPEPEAIDFTATPAAEKRPTPDAATIDKMVEFANANHPRSDGRDWQASDILKNVVIAVMHPQDEDHDEPWRELVVVGVPGDRTVDMKRLEAQFTPAEIEEATDEDLKKHPELVKGYIGPMALGPQARDGKKAENASETGDALRYLIDAHVARGSAWFTGADEQDVDYYDLVYGRDFEADGTVEAVQVRHGDMSPDGSGPLSFERGVEIGQVFQLGLKYSNALGLKVLDQNGKTVPVWMGSYGIGVSRVMACIAETHHDEKGLAWPAVIAPAQVHVVATGKDAAAFEAAEQLIGELEAKGIEVIFDDRKKVSPGVKFKDAELIGVPIIAVAGRDTVNNGTIEVRDRNGENAEAVPVADAAQAIADRVAALLK

SEQ ID NO: 136 - protein, 1272 aa, Bifidobacterium adolescentis
MGVQVADTLAWISDELRSECSQPVLQRARGIANQWRSKMEDLHCLNDTASNRITLYATIRGTTSPSSRYEVQATLDFADELFLARYCSCPAFSGSQRGYGSYRTFDYHNSPKYRSFDDDDDYDYVDDYDDFGSGSTYGHVNDDDDSASSTSRRYTGMCKHVAAMLLLFLQQPERFRGFHAAAATPRALADYMRSLDAKSNNAGENAQLDVLKRIINAKSRLIEEQRGASGQGAAKPKRKSSAPVDVKPGSVYLEPTLINGHDALRLSLRIGCGDADYALKNISRFVADMRTGTYESYGKKLAFTHTPDMLDPFSLKLYRFLQQVIASRTAAQLQNGYYYGEAVRVDRELVLTDWEACDLLDLFHAVTQDEYKEHESKARGFLRTSDGDGLRRLLIEDFQRTKESGPSRIHMANEGGEPFGLDIVEGDPTFTFKASYVHEGTASGVRITSNQSISDVINGRNGFYVFSRERPDDSTATDRIGIDGLFRCTDKLRPALQVLPDLCSDDPDGVFIAENDWPMFARTIVPKLTEAGIGFDIPQEVTEAVGTECRIEFYLDRDLYGITCEAVAKYGDFTFQLVPTAKELRGVINPDSRSRASQVKRDLSRESFAVQVVRQLCPTWSSIDVARVKEEDEQAILLMLTDGVQILKSVGQVFSTAAFDGMMQPNPPSVKVGLSIDSNLVEISPIADEVPMNEVGALLDSYRRKRRYHRLKNGTFVDLKEADLHELDQVSTDLDLSEKQLDSGIIKIPGYQAFLLDSQVDDEGKSASFVDYVNDVKIVDPKRYEVPERLKTVLRPYQVEGFQWLSTLWDKGFGGILADEMGLGKSVQLLSLIEARKGNGPSLIVCPASLVYNWAAECEKFAGDLTVEVVAGTKAQRRKAIATVAAQSQENDGATTNGATTYDGTDVVITSYDLLRRDVDDYAACHFALMALDEAQYIKNHATKVAKSVKQVTADHRFALTGTPIENRLSELWSIFDFLMPGLLGTYTKFREKYEQPIMAPGPEHSVMADKLQALVGLFIKRRLKKDVLTDLPDKFENVLTVKLEGEQRKLYAAHEQRLRATLTKASDADFNTKKIRILAEFTLLREICCDPRLVYADAKNASAKLDAIAELVATCMGEGKKVLVFSQFTSFLELIGARLAEQGVEYYTITGETPKKRRVELVDEFNGNDVPVFLISLKAGNTGLNLVGASVVVHADPWWNAAAQNQATDRAHRIGQTQDVNVYQIVAKDTIEERILKLQEKKNELARQFTDGTASGGVGTLSKDDLLGLLS

SEQ ID NO: 137 - protein, 362 aa, Bifidobacterium adolescentis
MWDSYDESMTLRLLDEANYDAEMESKVLPALDACMTEGWMDPATVDWNGDALPKLDEPGRLHYCCYDAHKFDVLREDGASGIFRGVVVISHGFTEFARKYSEMAWYFLLSGYSVCILEHRGHGHSAHDVSNPSLVWIDDWRRYVADFAAFADTVGREYACGGPLNLYCHSMGGGIGAAVMEHYPSLFDKAVLSAPMIAPVVGMPTWIARIATGALCGLGFGKARVFGHTDFSPELDLDEHKGASEARVRWFHKQRVDDVACQTNAATFEWAHQAMALSRAVLKPDMCGAIETPTLLFQAGRDVWVLNGPQDDFVERVREGGGSIEKIRYGKSLHEIFSMPNTVVGPYVNKILDFLSAPADSL

SEQ ID NO: 138 - protein, 375 aa, Bifidobacterium adolescentis
MAEVVFDHVTRIYPGNDKPSVDDLNLDIKDGEFLVLVGPSGCGKSTTLRMLAGLEEVNKGRILIGGKDVTTMQPKDRDIAMVFQNYALYPHMTVADNMGFALKIAGTPKEEIRKRVEKAAEILDLTEYLDRKPKALSGGQRQRVAMGRAIVREPKVFLMDEPLSNLDAKLRVQTRTQIAALQRQLGVTTLYVTHDQTEALTMGDRIAVIKLGILQQVGAPTELYDRPANVFVAGFIGSPSMNINTHPVVNGKAKIGEDTVDLPTEAVNKLTAEDNGQIVVGFRPEDASLAAPDEANAFSLKVMNVEDLGSDGYIYGNIITDGSAAEASTMMSDQNKLTTIRVNPRALPKVGDTVKIKIDPSKMHLFAPSTELRLN

SEQ ID NO: 139 - protein, 3111 aa, Bifidobacterium adolescentis
MNTFFLDRLNSEPHALAFAGQSTPWPVALADQSANPALDEALHTHAAAAQALLYPVSAELLATTGRPVDLFGFEPNPARLGAAAAASASVPGIALTQLGALLDAAALGYNPAQAKPVAVLGHSQGVLAVHMVQAICEAGSIDAAAAKIDEILAIATLIGVAGTRQARQLGLAARHGEATPMLSVKDITRAQVDALIERVDGARGPIAVAVTNSATHYVLSGYPEDLAAFGVEVAKEHKRQAKLREEKVRGGRVFDPTLEYLDVTLPFHSPLMADAVSQAVAWAEACGINADHARELAAEVLLNHVDWAARVRALMKSTDPSALWVLDFGPGNTVGKLFSTVAQGTGVGVVEASTVADRGALSTLETLPERTQNWTRFAPSIIHTSAGDKVRTAFTELTGKAPVLLAGMTPTTVEPEIVAAAANAGYWAELAGGGQVTASVFDRHVAKLEEELEEGRTVEFNAMFMDRYLWNLQFGSQRIVPKKRASGTPIDGVVVSAGIPEFDEAVELIHNLNADGFPYVSFKPGTVDQIRQVVRIAKAVAPTKVLIEVEGGSAGGHHSWESLDDLLLSTYAEVREQSNLVLVVGGGIGTPERGADYITGEWATEYGRPLMPVDGVLVGTAAMTAKEAHTSHEVKQMLVNTPGIPAKGDGNDPFAPLGEQWVPSGQAKGGVTSGLSHLHADIYELENSSARCGRLLVRVMKHPEELESRRDEIIAALNATAKPYFGDLKTMTYLQWAQRFADLSFPWVDETYADRFLHLLQRIEARVTTQESGEFASLFASRADVEADPNAAIAKLAETYPQAGKLTVTPMDEAWFPVLVREYPKPMPFVPVIDNDLLRWWGQDQLWQSEDSRYSADSVRIIPGPISVAGITTVDEPVADILGRFEAAMVKRVSAESASADKTAFAQLGAAVSAEEFIRKSPNISWVGHLMANPAYGTANGDANYEIRKVAVEGSVEKYDLDIHLDTFWDNDPDGGASKHAVRDIVIPLNVDGNESGLFPVVDRDRLPEHVYRMLADTAGIGNTAITGDKLTAMPQIEEVSDKTAFPFGQAHTGYTLSANLGFDHEAATGGALPSDLVPSRIAPDALVGPAWPAIYAALGSVYVNGFPVIEGLLNAVHLDHLIELEVSEDELLKHTGERIELTSWADDYFESASGRVVTIHVTHTAQDGTLLANETERFAIRGRAYSDALPPEAPDYGGIEAEIESTPRRLLRRVKVVAPHEMTAFARTSGDFNPIHTSHRGAAVSGLAAPLVHGMWLSATAQYAVQALDEKGAHYEIAGWTYNMYGMVQLDDEVEISIERVGRVAHAGMVLEVTSRIDGNIVSRGTAIVRAPKSAFVYPGQGIQKQGMVLDERAKSPAAREVWERADKVTREKLGFSILAVVRDNPKELTANGVTYRHPEGLLNLTQFTQVALATVAFAQTARLREAGADIWPAYFAGHSLGEYNALSSFAGVIPLETVLELVFHRGSTMHHLIPRDEKGRSNYRMGALRPNQFGVGDDGVREYVESVSKASGEFLEIVNYNLAGQQYAVAGTIAGLKALKADSARRVAEYGGKPAFMLVPGIDVPFHSTLLRKGVPEFRDKLDALLPKHIDYRGRLVGRYIPNLVAVPFEMTKEFAAKILEVVPSERIKAALDDPKVWDSYAEDDQKLGRLLLTELLSWQFASPVRWIETQALLFGSAEQGGLGVEEYVEVGLGNAPTLANLGAKTLRLPQFAGRDVTVYNVGRDEGRVYMTDSDSLVADDDADDSVAAPAAASAPAVAAAAPAAVAAAPVAAAPAAAAPAAPAGAPSGAAVADIPFNASDAIAMLLAYSAKVRPDQIGESDTTDTLTNGVSSRRNQLLMDISSELGVASVDGAAEATVKALSALVDKVAPNYKAFGPVLSDIVRDRVRGLFGAAGVKLGQITKRVTDTWQLGEGWASHVVAALVLETREGASSRGGDLASLSTEAASNAAAANALIDAAVQKVASDKGVAVAMPSAGGAAGGAVVDSAALDAFAAKVTGADGVLASTAKFVLNQLGVTASVADDSADENAAVVAAVEAELGSDWPKQVEPRFDERKAILFDDRWASAREDLSRAYYDNDASALDGSFIGLGKAVADEAAWYAGKTADAELAAAFKRVAGEALEQTNDSAEASRFAGDIAVVTGVAPNSIAAQVVNGLLAGGATVVATSHSFRQSVKAWAKQTYREHAAGDAKLWLVPANLSSYRDVDALVAWVGNVQKKTSGATTTILKPAYEPNLFFPFAAPPVHGTLADSGELFESQARLMLWGVERAITGFAKIGADTDVQHKLHVILPGSPNRGVFGGDGAYGEVKSAFDAIVNRARAEKVWSSRVTFAHPKIGWVRGTGLMGGNDPLVEVVERHGLKTYSTAEIAVKLLELSTKESREQAVKAPLDVDLTGGLGSEPIDIKALRAEAMEDAAKAAAAEAGDEDKQGDCAAAATLIKALPSPRAPRQAKVDLKDWQHVTARPEDEIVIVSIGELGPWGSGRTRFEAELGIHSDGEVDLSAGAVLELAWNMGLLTWNDSPKPGWYDTDGNLVPEEDIAERYHDEVVARSGVRPFEEGMGNDYKDGADEEEAEVFLDHDVTFSVPTREIAEEYVKLDEAHTSYAADAESGEWNVTRHAGSMIRVPRRAAMTRTVGGQFPKGFDPVKWGIPASMVGDVDKIALWNIVTTVDAYLSAGFTPAEILEAVHPSMVASTQGTGFGGMASMRKLYLDRFLNHEIPTDILQEALPNVVAAHVMQSYIGGYGNMIQPVSACATAAVSLEEGADKIALGKADFVVTGAIDDIGVESVIGFGNMNATANSEEMYAKGIDARFFSRANDRRRGGFVESQGGGTILLTRGDIALKLGLPVAGVVGFVHSYADGAHTSIPAPGLGALAAGMGGKDSKLVQDLAKLGVTPDDIAVVSKHDTSTNANDPNESELHNTLAHAIGRTDGNPLFVISQKSLTGHAKGGACIFQVNGLTQLFKSGVVPANAALDCVDPKLKRDDHMVWLREPLKVGSVKAGLATSLGFGHVSGFAAIVNPGAFEASVANIAGEDALNEWRDRANARLAAGQRRLEEGMMGRAALYEPIDNRRFHEDGRGYDAHEVEKAMLLDPNARLASTGYFEA

SEQ ID NO: 140 - protein, 558 aa, Bifidobacterium adolescentis
MDKENMNSMKKKALAFAAAACAFGMLLSGCGSSNGDSTADKGSNVITAYNSEPQNPLIPGDCNETGGGKPLDLLFARLISFDAKGNASNEVAESIKSNDDATQYTIKLKDGWKFTDGTPVTAESFTKAWSYTANAKNAQLGSSFFSTIKGYDKLQDGDKLKGDEQLEGLKVVNDHEFTVDLNRSDSVFAIKVGYTAFAPLPESFFKDPKAFGEKPVGNGPYKFQSWDHDNQIVLVKNPDYKGNRVAKNDGVTFKVYTKDEAAYADIQSGSLDVMESVPASATKTFQKDSTVQAYNKAGSVIQQFTIPAKLKHFETDTEEGTLRRQAVSMAINRENICKKVLNGTGTPAADFTSPLTPGYSDSLKGSGNLKYNEKKAKELWAKANAISPWTSDDKFTFAYNADGGHEVIYTAVVNSINNVLGAGVAATNPYPTFNDFRTAVSDRKVNGAFRSGWQPDYPSAENYLVQNFASAAADGNGSNDGDYKNPEFDALCDKAAASKSVADANKLYQQAQEVLLNDLPAVPLYYANAYGVASTGVSGFEMNWQNLPVYENMTKSGK

SEQ ID NO: 141 - protein, 726 aa, Bifidobacterium adolescentis
MPTMSENKKAGKADTFLSWTLGVLACLWVAWCCGIGPLYWFGTGLADFGWANVLYMAIAFVVSFAILRSLVRYGRGERVLPTYFSRRYVKLCQEVSGTPTTVLGIMLHHLSDAAHSRPGRAIHAVIVWIGRKLTRCTDCWWKLMLLFVIGWLWIPTTLLAAYGADIRSQIREFSWALNQWTGLKQPYIGFFSFVPMDIYPTAHYMWPANPTYLTDQHNIVLTVFYGAFAAVSRYFTDSNDAGIVALAALQWLFAAFCCAATANRFFNLPWRRLGVGTFDFSHPERHDCWNMRDFTHPEAGVVARPSRLRAGAKTRFVILLFFMVCPLAVFATISLTKSPLFAFAFVWWFGVWYELHMTHIKALPTINGKPMKLRKRSLAALFMSSCVMLISAKYAWYIILFAALLAIINDRKRWKTYVVALMLPTVLIHGGLVYLVNSGAVIGGDPIESRGIQLQQIARVAKYNPQGIPEDAAKKLAPVFNLDQMAESYFQQDADPVKSSGIQSKKVSYKWRTVTKDDMKDFNDAWWQIVKANPQIALDALFAECFGYFNVTDLPYVSMDYYVNNDYVQSDNEWIHLYNHQWRNQVAGFAKKWGQIPVLGWVTHGNLYVTLTLLIGAAEVVLRRWRSLSWHLPLLLLMGVMITAPANNFERHMLPIAFVFGFLCLEFWRESRAARLAAREASYVVTSTAGKRRIGGRRIDRQQSDKQDADERYLDGRQLDGQEKES

SEQ ID NO: 142 - protein, 937 aa, Bifidobacterium adolescentis
MPRSVVPTTNEGLDQVEAVVSSDNSTNNAASSAGSVSADPAPRRRRGGRRVVRGVGAAGASLELKVEEHAKAPLFEEPKLEPVQPARDSADFNDADDAEPSRPRRRRVTRYDDDDEMRDERPRRRRRSSVDVQDEDDRPSRRRRRISDEPRDDRDDRDDYGNRGNRDESSEDRALDAVSALPEGHETRHNPRPMTSLLFQEPILPAAPAGRGSSDDDDADDTGRRGSDDARDSRDDRDDDRPTRRRRRRSHDTADTDRTDASNDGRGRDDGNDRNNDAEDDDHGDSRRSRRSRRLNAQERRAAAEVEQIEEDLVLDGITYAPIDDESRNGNDDDDEQPTRTRRRRRGRGNHEEADEQQTSERESRRRHEDDDEEEGTVTRRRRRRRGGSKAEESDETMSRRSRKQQYIDEITDVEGSTRLEAKKQRRRDNRRERSRQNQLMEQDFLARREHVERLMVVRERERHTQISVIEDNVLVEHYVSDIQEVATVGNIYLGRVQNVLPSMEAAFVDIGQARNGVLYAGEVNWDSARLEGQPRRIELAFKSGDPVLVQVTKDPIGHKGARLTSQVTLAGRFLVLVPSGGMTGVSRKLSERERARLKNIVSKIAPKDMGVIIRTAAEGASEEAITKDLENLVRQWERITAKRDEFLHGKRPKLLQGEPDVAIRVVRDIFNDDFSKMIVEGDRVYERIEEYLDTMAPDLKDKLEKWDPAEHDGKDVFDKWQIDSQLRKGMERQVYLPSGGSIVIDRTEAMTTIDVNTGRFIGRGKSLEETVTRCNLEAAEEIARQLRLRDIGGMVMIDFVDMVMPANRDLVLRRLVECLARDRTKHQVAEVTSLGLVQMTRKRIGQGLVEAFSEECPTCKGRGFILHDEPTVSADYDDPYALKGGDPFVKTNKHGHGTDVQVPKGSSPDVKAKLAQIAAAAVAANNADLGEEEQEE

SEQ ID NO: 143 - protein, 438 aa, Bifidobacterium adolescentis
MTNRKMFFTMLWGAVFRRRSRAMMAVIASLVGAATLFCLASVCVAVPQQMNEEMRAYGANLIVTPASATGKSQGIDTATVRNVTALIGAGHSVKSAAYRYESVRINSAPYTIAGVDVKAVRALNRHWNVTGDWPGSGNVMVGRDVADALGVKVGSRVTIGYRAADASASASSSASAKSDSDESTETAESSAQGTQSTQTTQGEQTTQATENGRVSSDIMDNNGTEFRIAGIVDTGGNEDSIIYATTADMAKLAGSKRGADVVEYSVNAMGDELNDIVNNINRSADKNPNSAVKAQTVTRITSSDTRIIAMLQTLFWIVSLVVLVLTLVGVGTTISSIVSQRRNEIGLRKALGADSRAIGVEFYVESGIYGLIGGLLGTAIGYVLARVLCSTVFGRALGLNWLLCVGSLLLSVAIAVIASIPPVRRATRIDPAIVLREE

SEQ ID NO: 144 - protein, 355 aa, Bifidobacterium adolescentis
MQLSWHWPWVFLAGVIVVLAVAGVTLLVAARHKTDDIESARTFSLDDDLNTESASRLFRQWRVLSRLAVILLVVALALATALVARPSTVDEGEEKASSRDIVLCLDVSGSALPYDREVIDTYRQLVDSFKGERIGLSIFNSTSRTVFPLTDDYELVSKQLDKASSILAGVESQDDIDKMKDSDYQAISDWLEGTQNRKESTSLIGDGVVSCAAMLPGFAYGNASADNAERQRAASIVLATDNVVSGKPTYTLDEALNLTKQAQITVDGLFSGPKQSEADETTQEFKSAIEAHHGVFLTQSNGASVSSLVKEIESRRNHENESSNKAAMVDAPGWWTLALAIVLMVWLALAWRLRR

SEQ ID NO: 145 - protein, 1023 aa, Bifidobacterium adolescentis
MANETRIEHASETWLADSTVFEVNRVPAHSDHKCYAHDPQTNEWSDLRQSLDGEWRVEVVQASDIEFNEEPFVRENFDDSAFERIQVPGHLQMAGLMNNKYVNIQYPWDGHENPAEPNIPENNHVALYRKTFTMANRLADTKNAGGTVSIVFHGMATAIYVWVNGMFVGYGEDGFTPNEFDITEMLHDGENVVAVACYEYSSASWLEDQDFWRLHGLFRSVELAAQPHVHIENMQIESDWDPESGSASLDAALTVRNAADAATISATLKNSDGNVVWETANCADPDTSISTGSLNGIHPWSAEDPVLYEFEVTVIDHAGNIAEVAVQKVGFRRFRIEDGIMTINGKRIVFKGADRHEFDPKRGRAITEQDMIDDVVFCKRHNLNAIRTSHYPNQERWYELCDEYGIYLIDETNLETHGSWCLPGDVLTEETAVPGSKAHWEGACVDRVNSMVRRDYNHPSVLIWSLGNESYTGDVFRAMYKRVHDIDPNRPVHYEGVTHNRDYDDVTDIETRMYAHADAIEEYLKNDPQKPYISCEYMHAMGNSCGNMDEYTALERYSKYQGGFIWDFIDQAIYATQPDGTTSLRYGGDFGDRPSDYEFSGNGLVFADRKPTPKAQEVKQLYSNVHIDVAEDSVTIKNDNLFTSTGEYTFVLRVLADGEPVWQSERRFDVPAGSTEKLDVDWPLDLYRDGASELVLEVSQRLAKATNWAVAGYELAFGQTVVAGSKKASAPVKPVDGIVTVGRWNVGVQGSGREVLLSRTQGGLVSYTFNNREFVLRRPAVTTFRALTDNDRGAGHGFERAQWLGAGRYARCIGNEIEQIDENTVKASYTYELATPQRTKVTVSYTADTTGRVNLHVEYPGEPGDLPTIPAFGIEWTLPVQYSNLRFFGAGPEETYQDRKHAKLGVWSTDAFKDHAPYLMPQETGNHEDVRWAEITDEKGHGLRISRAEGAEPFAMSLQPYSSFMLEEAQHQDELPAPKHMFLRVLAEQMGVGGDDSWMSPVHPQYHIPADQPISLDVDLDLI

SEQ ID NO: 146 - protein, 2026 aa, Eubacterium dolichum
MIKTKVGKLCLASAMAFTTCVPFAATPIYAKDESSFKGVLASVDSVTVGKDKNIVDISFNGGKVKGRITFLEDGIFRYNVDPSGEFSEYATPRSQSHKATIQAQSDDSNVYSKPEAKITDDGSAYKISAGGATIVLDKNTAEMSIVNEANETVLDESAPLSIGNQTVQQLEQKSDEYFFGGGTQNGRFTHKGKTINIANESGWTDGGVASPNPFYWSTNGYGVLRNTFAQGSYNFGNGISNVATTHNENEFDAYYFVTSGKEKSVAETAETVLNEYYDVTGNPALLPEYAFYLAHLNCYNRDGWTAESDKGWTLEDGKKYQELGQAEGYVIPEGTYAESLNNEGPTVDKDKFKGVINEDTQKYSAQAVIDGHIKYDMPLGWFLPNDGYGCGYGQNGYYQKREAGEGTERMTAAIDANVANLKKFTDYAEARGVRTGLWTQAALTPEDSEKDSHYQGFQTLRDFKKEVKNGGVSALKTDVAWVGQGYSMSLNSVKDGYDILSTSGKRPALVSLDGWAGFQRYASVWTGDQEGGNWEYIRFHIPTYIGQSLSGNPNIGSDVDGIFGGSSLITTRDLQFKTFTQTMLDMDGWGAKPKKPYNNGDPYTSINRMYLKLKAQLMPYLYTYAHESVDGLPMIRAMFLEEANAHTFSTATQYQFMYGDNFLVAPVYQDTAMKENGDDIRNNIYLPSTADTWIDYFTGEQYKGGQVINNFDAPLWKLPLFVKNGSIIPMYEENNNPMTITEDNPKGLDKTRRIVEFYPYEESSFDLIEDDGISLDLANGSRNYGGQVKTHITSVVDGDKATLTIGKSNGNYNGYNSNRHTTFVVNVSKEPSSLEAKNGASKVSLEKAKDYADFEARAKKNEAVYFYDESPNLNKYSMDGEEFKNTKITTTPKLYVSLPKTDVNQNEQVLVVNGFENDSEALHMKDELNEKLAVPTLKFDEEKKTPTSILAEWTTVPEATSYEMMIDGVLYAVGDEKTTSYNHVDLAYNSAHTYKIRSRNKDGYSAWSEEQTTSSLQDPWRNVPDVEVTWNGGDAWGALKNATDHNLSTIFHSTNGDAVSKAEPLIMDLGAGYQLDKFVYTPRGTGQSGDGPVGVSSNGTVSQMDVYISLDGKNWEKVHDGASNPWTYQKDAEVKDSQKEVSLEGKSARYVKLIATKSVGGFFAANELSVYKKDGTSPFAIGSISAQGRDEVTESDYQNLMTYKGLSTKDNPTFANQVQNYSMDINMNGVYDVYDYTYTMFNLDGGTKKEGSVSGNALLLPSATSVNAGDTFTIDVYAEDVKNLNAIGQVINYDPSKLEFQKAEQSALIAQMEDLTVNKTYDSDNTAYVNLAYVNRGNKPVYEGSGILATITMKAKTNLTNVAEAIELNKVTLIGPNHNEVVTNTDETPEIPDVPVETTKEYTLNDFNITMTNDVLTTDDGTNVNKILQAGGYDALFNGTNGREFEFKWSAQSADAEKLPAYVKVPTTMHFEFKKPSSLTNFVVHNSDNATANSNGYLTSVKATITFADDKVEPKVITFDKPQDAYEFVTGSNELVKKVDIEFLSSSGTAQYDDPQKNRMLTLGEIDFNLVTGVPVEGIKPADSNAKEIFVGYLSDVKAVITPEECPNKFFTVTSSNPEVASIVTLADKNGNPIYKVRGVSEGDATITLTSAADKTKTASYVVRVVKGADKKELAQLIEDYKNLAADNYTAESYAKFEKALAEALKVNSDVDATRAEVDNATVALRNAVMSLETKPVDEGKLLSGHIESADALYSESNTADKMFDGDLSTYWESPYSGSNVGLPKDVVVKLNKTYTLEQLTFISHTARNGGVTNYRISVSMDGQNWTNVTSGLVDYDAYLKNENVTVNARFAPVNANYVKLTVLEAVGRVQSEDNQYARIAEMKLYGEVPSEPVDTSSLEQLVNKYKDTEQGNYTDESWAAFQNALFEANAVLEKENPTQDEVDTAYANLKNAIEGLTDKENPDKPVDPDNPTGPIQPVDPENPGNQSGGSKDETNTGDVTNLANIFILLLLSGAGLVLLRKKSRQ

SEQ ID NO: 147 - protein, 401 aa, Bifidobacterium adolescentis
MGNAENGAQPQLSKRAQIANPFRAMVFGAMADEMIADGTDVVKLSLGEPDFGAPPAVRDAMREQYDGRPLPYTAAMGLPELRQAISDFYKERHHVDVDPKRIAITAGGSTALLLSAALTVNDDDEVLIADPSYPCNRELVRAFGGKVVDVPTSAATRFHLTPELCKEYWTDRTKAVMITSPSNPTGTTIAFDTLKAVCDLARERGAWRIVDETYLDLADREPDGSDVKSVLACDPDAIVCSSFSKFFGMTGWRLGWMVVPEYALEAMDDLATNFFLCAHTPTQHAALACFTPETLAVCEERRQELLERRRIVVDGLAEIGLPLEVEPNGAFYAYFNISSTGLDAWTFCERALKEAHIALTPGRDFGEATADTHVRLSYAASREALREGLKRLGDFVAKVRG

SEQ ID NO: 148 - protein, 332 aa, Bifidobacterium adolescentis
MRKRSQAIIAAMLALGMAVGMCGCEGQLPTPKATTRQDAPNLSAKQEQKVRTRILKTLDQCNQNRDTDTLPTILEGPELDIRTSELNVAKATGNLDRKTTIPTDLAQAVISTDAGWPRSVFSITSTTKDQQSKRLLVFRQDSARQNYKLWGVARLFSGVKMPSFEISKTGSAQGTPTDTGLVMTPKAAVDAYADLLQNGANSKYASKFADDDLRSKLADLTAQVQKAMELNEGTQQQTFEPVNGAISVMRSADGGDLVVAQINSEWTRSAGAGRESQPASDAEKALFGNGKATSTMKTSYVNVIALYVPPANSGQKITAVGSERQPVKVEAL

SEQ ID NO: 149 - protein, 648 aa, Bifidobacterium adolescentis
MPVYLCPTTRHNSAQRHPKEEVMYYSNGNYEAFARPRKPEGIDDKNAYIIGTGLAALSAACYLVRDAQMPGDHIHVFEKDPVPGGACDGANIPGVGYVMRGGREMDNHFEVMWDLFRSIPSIETDGVSVLDEYYWLNKDDPNYSLCRSTKARGVDGGTNGKFALSDKASMEIMELFFTPNEELYGKKISDFFDDEVFDTNFWMYWRTMFAFENWHSALEMKLYIRRYIHHIGGLPDFSALRFTRYNQYESMILPMIKYLEGFGVQFHYNVKVENVDFAIGGGMGPVRQRTGTGQDTILRKQAEYGAYPRNPFSSPTKKMATRIDLTKADGTTRSIDLGENDLVFITNGGCVENSSMGSQTEPAAWAPEIKPGGGWDMWRRIAAQDPSFGHPDVFCSDPEHSKWMSATVTTLDGEIPPYIQKICKRDPFSGRVVTGGIVTVEDSNWLMSWTLNRQQQFRDQPKDQLCVWVYGLFPDKPGNYVKKPMQDCTGEEICEEWLYHMGVPTDKIADLAKNHANTVPVMMPYIDAFFMPRSAGDRPDVVPDGAVNFAFLGQFAETPRDTIFTTEYSMRTGMEAVYTLCDVDRGVPEVWGSVYDVRNLLNATVMLRDGKPITDMKLNPIERGVLKQIVKKLDSTDIPTLLKEYGVI

SEQ ID NO: 150 - protein, 215 aa, Bifidobacterium adolescentis
MTSVVVFDYGFGNVRSMVRALANLDLDVTLTSDHRQALEADGLVVPGVGAFGACMEGLKSVGGDRVIKDRLRAGRPVLGVCVGEQIMFERGMEHGDGTPGLGLIKGDVELLDADVVPHMGWDTVEAPEGSVLLKGVENERFYFVHSFAAMSASPADTSADQLDFGDAEEHVTWCTYGRSRFVAAYERGPLFATQFHPEKSAEAGAQLLRNWVATF

SEQ ID NO: 151 - protein, 354 aa, Bifidobacterium adolescentis
MDAKERICLTYGNDQGGHQMSDTILQSNDVMDSRRGDIVVGVDGSDESFAALRWALGEASLTGQQVNAVYAWTHSWDMGSQPEDEEQWAQMRHDIARRLREWVAQASQGMTIDENRVKLTSVKATGTAALLEIGKDAQQIVVGRRSLGRVARWFLGSLSASLAEEAKVPVTVVRILDDEEASVQDAIANALTPTEETVSYTMPGSPLPRNQRPVVVGVDGSETSKHALRFAIDFAALHHAPLQVMFCWQLKDLGVVKGYENAVAPISVGQAQAERMLDELLDSVQVSSANIPDDFQIESHAFHIPASKGLIAASRYARHLVVGSRGLSGLDAHFLGSVSKQIINFADCTVTVVH

SEQ ID NO: 152 - protein, 329 aa, Bifidobacterium adolescentis
MDGVFETQPDRTDLPLVVMPVVIESMIGPFKRNFTMLENVARVRMYEDFTLDEDTIVERCKDADAVMVIGFHCADAILDRLDAKCYAFGGTGVASYINLEKTKERGIRVCNVLHYGDHAVAEHAMALLMELTRHAGALDMQVKQGDWDGADGFELFGKKLGIIGLGGIGQTVAGIANAFGMKVSAWNSHVPAQVFENLNVTPVEDMNELISNSDVVSVHMPLLDSTRGIITAKNLDALRPGTLFVNTARAEVIEPGALLARLQRGDIPAALDVFDHEPLAADDPLCKIPGIVLTPHIAWRTDGAYIGMTKQVVQSIAAFFKGEEFNVVV

SEQ ID NO: 153 - protein, 316 aa, Bifidobacterium adolescentis
MDRQVGQAAHARQELVKLGEQADRGGLEKNMTIELNNNVYADGGNDTETTPVVLVHGFPVDHRMWDECAAALRDQAVKQGVKPFAIWAPDMPGAGEGPIPSDEDSGGKDADGAFPYGLDRMADAYVGLLHAAGYGKAIWVGLSMGGYLILDIQRLHPEAVAALALCDTKADADSADMRLKRVAIATDCETTGTHEPVMGFAVPSEADSTVKQSDAYCRQFETWINEQPADGIAWRERMAAGRPDLNDVLPNINVPVAVICGDKDPSSPPAVMKPVADAMTKTDVTMTVIDDCGHFSAYEHPDQVAAALLELVKRVG

SEQ ID NO: 154 - protein, 480 aa, Bifidobacterium adolescentis
MGSFNRRQEADDLTDYVNNGWLSSAEFDGPTFLWNHLIREASQEDAAQRNDVPVANLSDADVVINMPMQWYFDALASMVPTAERTDTGVEIPRIDMPTFSIDSQALSGVDAVVGNAVISTRWLDAVGNLAKAVEMTARFVGNVADRDNEGFDYLKDLIQTVRVYMDAVACNADPMTGEQALRMITQVACNEDFRLNAMQMVELLSCGLSFAQWDDTRMFAYDALNKGIAAMRDFAAKSGNGDASSTTGDTMNSVGSIDSDVTGDTGARDATATQSHNLRDTSSDADNAHSTNSTDAADGADTANSITHSTGAAGDSTTGGSPTLSPEELNDLAMLDPSFLSKQQLAQTAQNQFDHAVQFLRHDLMRISGDAEEADRFLRDNHTSEPLADAYAARLIAAERWQDLLNFVDLVERDAPNQCTVMFPEEVVPYEWESIREAALEALGRGGELVAMYQERLDDTYDPNTELNRMKLQAWTQAKE

SEQ ID NO: 155 - protein, 563 aa, Bifidobacterium adolescentis
MKYIGDTVSFTSVTIISPEAANGRNVVALGVTKALAAAGKTGVFRPAVCRKDTFTDVLIEASNAGLSREQSVGVCPKRARNDKEGSRADIVAAYTQAVETARPDAMVIVGTDRSAVNDPAMFSFNADFAADLQSPVLLAVCTIERTPEQVKSTVEASTKVIEDAGSKVVGVFITGCDDTQPDPLKACFVDYPVPVWTLPAVDFNDDDAISKADEAFATNVDAAELTAALESPFDAPTTPYAFQYGLLGKAKADKKTIVLPEGNEDRIIKAADYLLERDIVDLIIVGDENAILARGQELGLKSLGKAKFQAKDDETVLEPMVAKLCELRAKKGMTEEQARKQLADDSYFGTMLVVMGMADGLVSGSVNSTANTVRPALQVIKTKPGTSLVSGAFLMCFKDHVAVFADCAINLNPNAEQLAEIAIQSAETAKAFGLEPKVGMLSYSTLGSGKGPDVDLVEEATTIVKDKAPDLAVVGSIQFDAAWSPTVAATKAKGDPVAGHVNVFVFPDLCAGNIAYKAVQRSSGAAAVGPVLQGLNRPVNDLSRGATVQDIINTIALTAIEAQ

SEQ ID NO: 156 - protein, 411 aa, Bifidobacterium adolescentis
MGTMSVEVPEIDQLLAMTSPARYGDELPDEGSRGGALHLSSVLPAISSAIGHPIPTAIHADPKRLQEALGLPDARSAVVVLVDGLGYWNINMRLGHSPYLRSLMADSVNQRPIATCMPSTTVAAMSTFGTGTCPGLTGMTGYTQLNPDNGEICQLISFKNAPAPLKLQQQPTIFERLAEQDVRVTSSGLPKFAFSALTQAALRGSDYISNDDPHRRIMTAAKAANTPGLTYVYLRDADKIGHNYGWDSDKWIGTYERIDAQLSLLRRSVPKNTLIVIVADHGMITADPEACIDIVSEPQLMWGVANVGGEPRCVMLYGEDGENPEDIAARWRDVLGERAQVRTRRQAIEEGVYGPVDERVKSMIGDVVVSAAGSTTIVDSRTQAEKAMHLPSVHGSLTYMESDIPCLIDVA

SEQ ID NO: 157 - protein, 309 aa, Ruminococcus obeum
MLVNMNDVLYPAKKGKYAVGLFNAVNLELARGIIAAAESSQSPVIMGTAEVLLPYGPLEEVSYYLIPMAKKANVPVVIHLDHGLKKETCLKALELGFSSIMYDCSTDSYEDNVRKVKEMADIAHSYGATIEGELGHVGDNPDSAEGSSHINPADFYTDPKMAKDFVDKTGVDALAIAVGTAHGAYKLPPKLDFERIHTIANTVDVPLVLHGGSGLTDNDFKRAIQEGISKINIFTDINVAAVEAEFRKFETMNKGIIDLIPAAVEAVKQETLKKMMLFSSNGKGTLNQPSQDELVKAVVQEVLRELGRK

SEQ ID NO: 158 - protein, 269 aa, Clostridium leptum
MANLTLEDIANISFPRANFGGYRAEDVDAFIDDVQVSYDNVLKESAELKRKLAILAQKVEEYRNEEDSIRNTLLSAQKLADASVREAKHKAEVIVADATEKAERIILGAQKEANSQKGELGRLKEEVAAFRTKLLTVYKEHLQIIQQLPVEEETVKEKEAQAAEPAEEPEASQPEAPQETAGEETAPEIKAQEVVAADPKELEKTKVYEPVGYTETPMPQAAPMTPPDGAQPAEDQLPSRFASLKFGEDYDLKSDVEESPINNMFKKRK

SEQ ID NO: 159 - protein, 230 aa, Bifidobacterium adolescentis
MATLADYGPEVRAEVKQVREVVATLHEQLIKWNLVVWTAGNVSQRLHTADLMVIKPSGLRYEYLTPSSMVVCDLDGNVVDGAEAPSSDTASHAYIYRHMPDVYGVVHTHSTYATAWAATGQNIPCGLTMMGDEFGGPVPVGPFRLIGSEAIGEGVVETLKKYPKSPAVLMQNHGPFTIGKDAEAAVKAAAMTEEVAHTMWAAKQLGDIIPISQEDIDSLNDRYTNVYGQH

SEQ ID NO: 160 - protein, 764 aa, Bifidobacterium adolescentis
MTLIQTFRGTSSNGTDLTAVYAEQPAAGTAIALVLPGNDLPRLVHWGRPLSAPETVLDAFDAIAPQRVSGALDYTAWPSVLPTQSESWIGATRFDVRRNGVELFCKFVVTDIKAETVAAGNTYDMTEKDGYPNWNVASEPKQTPTVTVVAEDVEQCVKLTWTCELDETGLVRQRAQVTNTGDGQLEVGKVELAFTVPADANEILTTTGHHLHERSPQRQDFTIGRFAKSSMIGRPDFDATLLLSVGEHGFGFTHGNVYSAHVAWSGNSVLSAERLPYTTGVIGGGEVLFGGEVGLEHGESYTTPWLVGSYGEGLNEVASRFHGYIRRVHRDWLVDHGIAPKPRPVILNTWEAVYFNHDYDTLTALADKAVESGVERFVVDDGWFGARRDDTAGLGDWQISQDVWPDGDKSLKALADYVHGKGMEFGLWFEPEMVNPDSDMFRNHPDWVLKPTAGRLPMQGRTQQVVDLTNPDAYDYIYGAMDKLVSELGIDYIKWDHNKLVTEEVSPLTGRPAAHAQTLAVYRIFTDLKAAHPGLEIESCSSGGGRIDLGILEVADRVWASDCVDPVERADIQRYTSLLVPPEMIGEHVGASPAHSTHRATSQEMRMATAFFGHMGIEWNLLKEPQEDIDKLAEWTAEFKKHREWFAVDTVVHSDAADPAVRVDGCVMPNKAAAIYRFTQLTTSQTYPAAPVKLPGLDPDAVYEVSPLDVSLDLAKQDIGNGQSPLGWWTADGVKMTGRALATYGIRPPAIHPAQAVLFKVVRV

SEQ ID NO: 161 - protein, 765 aa, Bifidobacterium longum
MHSIDHTRADRPMPSNHERHLPSRPDTRHRLRLVRLLIALLAAVAAIAAMECIVFNLPFWRTLGASTDTNAVHNTLGSGLTRRNDGMLTVTDPTKAYLELTADGTSDYLRIDTESSEVIDKAREQAEAESKANDDKEVFKPLATIHVRADVDGITGKAQSMNPDAIRSHYVKAPGAGIVRIWIQEERGAIVPVTDARANVRVPFVINWMRVLAMALVLLMIAVWRPGSRLWRITLDPSSTRQRLAFVGLLAIPTLLIGVSIIHELWYASSLVFHVSGDYTYDFDQYGHVADALVAGRPWLDLPVPEQLAATEHPYDVATRAQLLANGASPLYWDYAYYDGHWYSYFGVLPAVLLFVPYRLLAGHNLPTSAAEYILVLLFIIFFSLLVLRVIHRVMPKTSVAAASLVVVSSLVSAQVGYLLYRTNFYQIPFAASLTLTSLGLWLWLGADTSRRPLRPSDRWQAGDAKPLSLPRLALGALCIAANFGCRPTFTLAALLAFPLFWPQIRALGTGLRTRRIKPLQALRAPLAVIIPAILVVTPLMAWNMVRFDSPFNFGNAYQFSISDMTRYTTPSADMPANIWYYLFLPLRFMDRFPWLAGSPAPMPQWGYYEVMVGAIFTATPLTLMALALPLLRRLETHGMRPWLMSCLAVAAVLVVFDSRVGGLGWRYSADFGWLISLASIPGLLWLVNGREPSRSLAGANDAASGDGIARVTPWRWLMRWVVMLAVLWALGIAILSCFVQSRSDAMIDNNPTLWHQVQAWFTML

SEQ ID NO: 162 - protein, 516 aa, Bifidobacterium adolescentis
MYSTVVSDVGTVRSNNQDSAFAGEHLIAICDGMGGHAGGDTASTIAIRSLAHIEQDNVDGDVQVVSHMMATSVMAAHDAIVGKAKRERRLAGMGTTVTSVALVAGCWVLAHIGDSRAYLLHDGHLVRMTSDHSYVQHLIDTGRISEAEARNHPQRNVVMRVLGDFDIDSRPDIAIRKAHPGDRWLLCSDGLCGVLEDSTLEEVLSTCADQEECAQRLVSMALRAGSTDNVTAVIADATLALDADAFDLPHQTPLVGGAASASLETIADIVNEPVASAPPLREGKQSPAARAAALRSGKDPNEEPKQPEQRVAQPSSVREDNGDRVNTDTGEIPIVQKRNGRISADPNDPEVAKAIRNEHIEERKTKRSRKFRNRIITILIIILVLLGVAGVGVGTYRWSQTKYYIGDNNGKVAIFQGVPTSIFGAKLSHAVTDTNMKTSDLPPSWREQLDQGISFDTYGEAKSHTRLIKKQLNDAKRKQEARQQEKAEAEQKAKDEAAKKATDQAAQTNKSGGDKS

SEQ ID NO: 163 - protein, 301 aa, Bifidobacterium adolescentis
MTASIINKTIKSIVAASAALIMAASVAACGPNAATPSEENNASNGGATTSKVTARSLDEIKKSGVLKVAVFSDKAPFGYIDKDGKNAGYDIVFAERLAKDLGVKVKYTSVDPAARVDVLTSNKVDITLANFTVTDERKEKVDFAKPYMKVALGVVSPENAEITDVSQLKGKTLIIAKGTTAESYFEKNEPDVKLQKYDQYADAYNALLDGRGDAFSTDNTEVLAWAKTNKGFKVGITKLGDEDTIAPAVQKGNKELLNWINDEIVKLGKENFFHKDYEETLKPVYGSDVDPNDIVVEGGEL

SEQ ID NO: 164 - protein, 695 aa, Bifidobacterium adolescentis
MPGMIKKEDIEKVRATADLYDIVSATVTLKPSGTGTYVGLCPFHDEKTPSFSVRPALGVWHCFGCGLGGDVFGYVEHQENIDFRDAVELLADKYHIELHYDKADNVPAHTGSKRARLLEANEAAQEYFVSQLMTKEALAARKLLDGRNFSQADCQRFGCGYAPQGWDNLVRHLAGKGFTQQEMLDAGLARQGQRGVYDYFRGRVTWPIRDSTGRTLGFGARKLYEDDTINAKYINTPDTQLYRKTQVLYGIDLAKSAIVKKRQAVIVEGYTDVMAMHLAGIDTAVATCGTAFGAEHAKIIRRLIADDSLGAVQLVGPLKVEGQALSSRVVFTFDGDAAGQKAAIHAFGLDAAFSTQAFVAVAEDNLDPCDLRIKRGNEAVRALIANARPLYDFVIDSAIDRFDTTYATGQMGAVKAVAPLIAQIRDRSLLDLYSRKAVRRIGVDLDIMQREVAYQRRKLNVRDEDAYAPKRRFQNNAGPSAEPAYAERGANPYANPAARKALEHRDAAEQSYYRIDDAVFICEQQFMATLIQVPLAVDPTMFASLTLSSFMTPVFRTLFQAVAAAGGLPGEDVPQGLWMHNLTKAGGPMLDSVINELAVMPLPLPPSEADTNRNAGESQEQSAQLRKPTQEERRYASELIVRLLDTGIMRKIGAAQRRMAQLPDGAEKIELLGQITKLETLRKDLQSRVFGNNVA

SEQ ID NO: 165 - protein, 504 aa, Bifidobacterium adolescentis
MSAELEDIHEECGIFGVWGHSDAARLTYFGLHALQHRGQEGAGIVSNDNGHLIGHRGTGLLTQVFSDEREIERLKGDKAIGHVRYATAGSGGTDNIQPFIFRFHDGDMALCHNGNLTNCPSLRRKLEDEGAIFHSNSDTEVLMHLIRRSSKPTFMDKLKEALNTVHGGFAYLIMTEHAMIGALDPNGFRPLSLGRMTNGAYVLASETCALDTVGAELVRDIRPGEIVVVDDDGYRIDRYTDQTQLAICSMEFIYFARPDSNIYGVNVHSARKRMGARLAQESPVDADMVIAVPNSSLSAASGYSEEAGLPNEMGLIKNQYVARTFIQPTQELREQGVRMKLSAVRGVVKGKRVVVIDDSIVRGTTSKRIVQMLKEAGAAEVHMRISSPPLKYPCFYGIDISTTKELIAAKKSVDEIRDYIGADSLAFLSLDGLVESIGLGADAPYGGLCVAYFNGDYPTALDDYEADFLKSLTPEDRVRLPEFALYKSKYEGNEYTTTSSQEEH

SEQ ID NO: 166 - protein, 1369 aa, Bifidobacterium adolescentis
MRFEYPSELPVSAARDEIAEAVKSSQVVIVSGQTGSGKTTQLPKILLELGRGSHGRQIVHTQPRRLAARTVAERIASEMDVKLGEEVGYQVRFTDESSPKTRLRVVTDGILLAQIQRDPKLMQYDTIVIDEAHERSLNIDFLLGYLTALLPKRRDLKLVITSATIDSVKFQEHFEHALHTKVPVIEVSGRTYPVQIVYEPLGTAPALMRSVPGFETGAMPGDADYESLSAAPDGRDGRDSRDTNVDMPTAVARACAELVIHSSHDRGPRDILVFASGERDIHEFENALRRHYGPRAADMRRPDAIEIVPLFARLSSKEQHKVFEPHEHQRIVIATNVAETSLTVPGIRYVVDPGTARISRYSKTAKVQRLPIEPISQASANQRSGRCGRIADGIAIRLYSREDFETRPEFTEPEILRTSLGAVVLHMLSVGVARTARDVTDFGFIDPPDMKAVSDGFNELTELKAIARKHGEVVLTHTGRMLARIPIDVRLGRMVIEAAKSTTPNTLAAVLVVVAFLSLQDPRERPDENREEADRIHNRYADPTSDFLTALNLWDRVFQADGEPSNSALRRICKTEYLSWLRMRQWKDLVAQLREMCQEFKFKLGEPIPVSRPPLEIRQLPLNQQAAHSLCCSWDAQGIHTSMLSGLLSMMGMQVTREPKASDFAGLKGAARARAMKRAQKMAKNDYQGARGTHFALFPASAVAKSTPQWVMSTELVETSRLWARYSAQIDPAWAEPLAGALTRTTYADPHWSGSRGSAVASAKVLLYGLPIVQDRTVQWGRINPLEARDFLIRQGLVEGDIQQRFSYDDFVMRNRDILEDAADDASRTRQVAQTVGDEDLFDFYNAIIPNTVTSVADLAKWWKTKHDEQPDLLDFDPDKVERLAGSDSVSLDDYPDHWHTLGTDGSPIDLRLSYIYDPHDPNDGVTVHVPLKALSRLTPEQFSWNVPGLLDELIVGMIKSLPKTLRVQFVPAPDTARKIRTWIDERYPDLPGSGSQQKPNIAPENEDGMAAWPDLPHVFTQAAISIVGAQIHPEVLTGELWNKLAPYLRMTFAVEQQLPPNRKNQHGRRHARGPVKTLGTGKSLVELQRRFAEQAKASARHMVEKQARNAGNQGKIVEQANLLNKAGATTEARATMLWQGALDTLRLPGERISSRWLGTEALMLASAPYKSTKELTEDLQLAAVKRLLPNIDQLPDDEALADAVLDVREVYEDTVYAVAHDVIAILKRYAEVDKAVSSKADLPLLSVLQSIREHIATLVYPGFIGKTPPDALPSIERYLHADLLRLTKAKNDKNRDVRWAWEADEAKQLADNTMAKAQREPAGPRHETLMKQAETVRWMLEEFYVSLWAQELGTPKPISLQRIKKAIA

SEQ ID NO: 167 - protein, 472 aa, Bifidobacterium adolescentis
MAKTSSQFLCSECGWSGPKWLGRCPECGQWGTIEEFHEARPAAGSRTAAPGRTSRTQSHPVASSAARPITDIGTEDISRIATGFSEFDRVLGGGIVPGSVTLIAGEPGIGKSTLLLETAGNVARLTAFATERNTVLYISGEESQAQVRMRASRIGAMEPNLLLASTTDLSTVLGLIEQFKPALAIVDSAQTIVSQDVDGISGGSTQVREVASALIDTAKTLDIPVLLVGHVTKDGSIAGPRTLEHLVDVVCQFEGDAETALRMLRAVKNRFGPTDEVGCFDMSGEGIEEVTDPSGLFLSTGNGSAATQVDGTCVTFTLDGHRSLPIEVQALVTKSVLPTPRRAANGVDSNRIAMLVAVLYRHGGINLLANDLYISTIAGGQAREPGCDLAIVAALASAAKSKPIPRTTCAIGEISLTGQVRPVPRLEYRLREAARLGFTTAVVPTLRKNVAVPGMGVVQADTLQDALAAILR

SEQ ID NO: 168 - protein, 431 aa, Bifidobacterium adolescentis
MGQLDSGNAAWILTSASLVFLMTPGVAFFYGGMVRAKAVLNMMIMEAAALSVTMIMWVLWGWSIAYAGTSVGGIFGDPATGFLLKDTMVSDKGVFTSAALNGNNYPVSVDVAFQSAFAMITVALICGAIAERVKYSTWMIFVALWITFDYAPLAHMVWNGGLLSADGAISQAIGAAAHDFAGGTVVHINAAVAALVIVLIIGKRKGFGTQPFRPHNVPFVMLGAFLLWFGWFGFNAGSAFAANGTAGYAWVSTSAATAAAMLSWGFTEKIRTGHYTAMGAASGIVAGLVAITPAADVVSPLWAIVLGAIAGVLTCLACGLKFKLGYDDSLDVVGVHGVGGFTGTVLIGFFGEGTGLFAGGDWRQLVVQLIVALVAIVWSAVITGIIAFALEKTIGWRVTEAQEVGGIDLADQGERAYDFAGTASSVLKEVK

SEQ ID NO: 169 - protein, 340 aa, Bifidobacterium adolescentis
MSIAFLLGRPSFRSRPSHIAHARLTTETKIAYDTCKCQYDKRLSEEVDHMGTRIDGKKVAARTKADLAKRVELLKARGIQPGLGTILVGSDPGSVKYVAGKHADCAEIGVNSIKRELPENATFDQVADAVRQLNADPACTGYIVQLPLPRGIDENAIIDLIDPKKDADGMHPYNLGELVLHARGDIATPLPCTPRGVIELLRAYDIDLDGKEVCVLGRGITIGRTIGLLLTRKAVNATVTLCHTGTKDVREHMRRADVIVAAMGVAGFVKPEDIKEGSILVDVGVSRVFDEESGRYKVKGDVDKACYEKALAYTPNPGGVGPMTRAMLLQNVVEMAERQL

SEQ ID NO: 170 - protein, 274 aa, Bifidobacterium adolescentis
MTSSSNTSNAMPKTQAMNATNEANGNYAATPQSNEIHSGVGVLDKTVKILDALESGPATLGQLVSATGLARPTAHRLAIALERHRFVLRDQHGRFVLGSRFAELAAAAGEDRLLTAAAPILQTLLDRTGESAQIYRRQGDQRVCIAAVERASGLRDSIPVGAMLSMEAGSAAQILLAWEDSERLHQGLRHAKFTAAKLTAVRKRGWAESINERDEGVCSISAPIRNASGQVIAAISISGPNGRMGANPGRRYAPLVMAAGKYLTDALIKASSGR

SEQ ID NO: 171 - protein, 141 aa, Dorea longicatena
MLMPSIFGENLFDDFFDYPFVKNEAESNGLMKTDVKDTEHGYEITMNLPGVKKEDVKAALKDGYLTISATSDSKKEEKNDKGQYIRRERYTGSCSRSFYVGDAVTEEDIKAKFENGTLKMLVPKKEEQKAVENKKYIAIEG

SEQ ID NO: 172 - protein, 637 aa, Bifidobacterium adolescentis
MAEGSNGRRRFSDKWGKHELDVLAVLSSAFPQWLTSRQIAQRVKAYADSYGELADQAAKAAFAKQFQRDRAKLAAMGIAIESRQPEYSSKSEGQDFASYRLQLGDEPRVRLLFGDEDLPILAAANYLARSMSISSAPAHEPQHASRTAPRVPQTPIPGLGLDSIAPGLGTQSIPDELVKVVDQRRFAATVDVDGEHLNVAYADSDDLAMFVLSHPGASIVSPQEAVDAFNRRLHAATQFVPADESTGTDSSTVVSPEINRNSTDEDDTEEGKGRPKKNSAFQTGSEVDRRLRLMLFLSAHMGEEYSLEELAERFIGRPKSDDELKKFVNIIHKDINTLTTVSDDGEMAGSQFFDIDWSLLDAEGIVSATNSLGLERLAGISQQYLSMLTASVSYLAHSSLLPDKLREQAESLYSRLRQHVKPGDMPWLSLTGYEMEPRNFSIVKSAISKGMLLDMEYTDGAGRIQRKLVAPDKIFVDEGVYYVAVWTDVSNAAPADKMKFVKTDTTINKATGKPRIWQVLRISRIEHAELVEPTEKVDIPDVPASELRKWSFDNGTPAVFITNQDDLSFIDSLSGATVEKCGEGEKVHLIVSSDSWYVAFCIAHARHITAVAPETLRTMIIARAQHELSVGDRENED

SEQ ID NO: 173 - protein, 343 aa, Bifidobacterium adolescentis
MAGIKDVAREAGVSASTVSYVLSGKRSISAKTTGKVMTAVEKLGYTPDASARKMRGMRNQIIALSAPIRGDINQARYNAYFLRTAWAARNAGYDVMLLTGPDAVKDIRRVTQSNLADGIVLLDVEQDDERAAQSGTFSKPCVAIGYPSSHAGCACVDIDFALMGRKAVDFLYEKGHRTVVFLRNNESDYNRHSGYVVIFRESLLAHAKELGMTVIESEHYEADSFDAQHFVSTVFAHPDRPTAIINQANASVLSQVLMALHDAGMSIPQDVSVLSCGTYFEGEPTRFPITEMPVMPEELCAEAMNMLVSAIEEHTDIKGSVELIEPALKRRGSVAEAGSGGTI

SEQ ID NO: 174 - protein, 991 aa, Bifidobacterium adolescentis
MLQINMADVMNVIGSLTPYLIAIGVLFALALIITFAVNKKTVKEVATRKIVHSESWLVALVGIVVAVSMMLTGPLSTLLNNATTTKYMLSDTTVSKANELAKEVQSEAITMLKNDDSNLPLSNKKVNVFGWGSTNPVYGGTGSGSMSDQYETVSMLDGMKQAGIETNSELTKLYTDYRKDRPVVAMWSQDWTLPEVPAKQYSDKLISDAKDFSDEAVITITRVGGEGADLPTNMKAKGITYNNNSKDYEDFKDGEHFLQLSQTERDMIDLVTKNFKKVTLVYNGANAFQFDFLSQYPQIKSVLWCPPAGQTGFSALGEVLAGDVNPSGKTSDTFVKDLTKTAVFNNTDGTAAGNASSVGTNGKFTYDNADDLAASYMGFSGDKVTVTPTFVNYVEGIYVGYKFYETAADEGLINYDDTVMFPFGYGLSYTTFKQEMGKVSYKNGKISFDVTVTNTGDKAGKDVVEVYYNPPYTDGGIEKASKNLVAFEKTKKLEPGASQTVKIEFDDDDMASYDQKDAKAYVLEQGDYDISIQSDSHHVIDHQKVTVKDTVTYNSDSNTHNGDAVAATNEFDYAAGDVTYLSRAGHFANYAKATAAPTNFSMSDEAKAEFTNNSNYDPKKYDNDSDEMPTTGAKNGLKLYQMYGKDYDDADWDKLLDQLTFDDMDNLIANGGYGTPAVKSVGKIQLTDADGPASLNNNFTGVGSIGFPASTAFACTWNRDLAKQFGEMIGDMAHDMHVAGWYAPAMNIHRSAFSGRTFEYFSEDSLLSGAMASNEIAGAKSKGVYSFMKHFALNDQETNRTNMVCTWANEQSIRETYLKPFEMSVKEGGAQAVMSSFNYIGYTYAGASSNLLQTVLRDEWGFKGFVLTDYFGGYGYQNADQEVRAGNDSMLATTKITNHITDKSATSVKAMRQAAHNILYTAANSWQYANGEPKVATPIWKTAMYVAWGVTAVLVIGLEIVAIKRYLNRKKAVATVESAAEPVAAGPANAE

SEQ ID NO: 175 - protein, 332 aa, Bifidobacterium adolescentis
MTDADVTEPASQHSDAEAPVPYRSGFVAVVGRPNVGKSTLINALIGTQIAIASSRPETTRKAIRGILTTDNAQIVLVDTPGIHRPRTLLGQRLNDVVDESLSDVDAIAFLLPADQEIGPGDKRILSRLRSDFAVKRDDGTFKWKVPLIAIVTKIDELDRSALIDKLIEINEFADFTDIVPVSALEHDNLAEVRNVLVENMPEGPQMYPAEQITEERPEDTIAELIRGAFLEELDDELPHSLAVVVDSIEYPEDNDSGESYAGKAQVIVSIYVERDSQKPIIIGHNAEHLVRVKKKLRTAVNRIVGQKAKLDLHVKVAKGWQSDPKQLEKLGF

SEQ ID NO: 176 - protein, 172 aa, Clostridium scindens
MARRIAKFHKVSFEQFREGFMDSFGPIEEEKIKEAYDGVQLPKRATAGSAGYDFYTPVSIVLHPGKTVKIPTGIRVEMEDDWVLKCYPRSGLGFKYRLQLNNTVGIIDSDYFYSDNEGHIFAKITNDTNEGKVVELQAGTGFMQGIFVEYGITLDDEVTAVRNGGFGSTTNQ

SEQ ID NO: 177 - protein, 592 aa, Bifidobacterium adolescentis
MQPPRSLPKQNKVWSRFTRRIQAIPLSTKLVTCIIVLLTIGTIGISFSIRTLVGNYLLQKTDTQLINQAQLIFNSMDSLSSDTGDDGRSLMNTYYVEVRDSEYKSTGAGSVPMLRDGVVSEPSLPADGSIDGVTLGQPFTTRAVVHITTSRTPDHSIMQAAQSPWRVVALPWNEKTRTGQVKDSGVVFIGLSLSDQIDTANTLTRFCAMVGIAVVLIGAILGTILVQSTLAPLKRIEKTAAKIAAGDLSQRVPDLPESTEVGSLSMSLNTMLTRIEESFHAQEETTEKMKRFVSDASHELRTPLAAIHGYAELYKMQRDMPGALERADESIEHIEASSARMTVLVEDLLSLARLDEGRGIDITQQVKLTSVVRDAADDLHALDPDRGISCGQVVLQPGTDMDHPAQFAFQNGQMPQIELKGDASRLRQVVTNIVGNIHRYTPADSPVEISMGVLPASISPESLSRMPSNEQSLRHLVEAIEVGQSMQVGMNYAIVRFSDHGPGVPPEARSKIFERFYTADPSRARQKGGTGLGMAIAQSVVKAHHGFICASGSEGTGLILTVVLPIAPVEPKPQPITASENRKNEKKNRSKK

SEQ ID NO: 178 - protein, 423 aa, Bifidobacterium adolescentis
MLLQFVTVLQGVLAPALLVMALSVMLTVGEGRDKPLSAYWRLAGFVVGFAGAVVFAALRATAVITQRTFVNYPTLWCCVILDVAVFVIVLFARRITADWHNHRALLDIANLVAALAIAATTFRALPDVILRLTIFVEPGDPIFTSDMLLRALGFALGAAVAIIAALIFRTMRSTAVRWSFTTAVLLLVALLFAQHFTDLAQILQSKRIVSFPTAAFLALVWGINHQRSLTIAMALVFAIPAIASIVMGFKVKPTGANEAIARTHIAFRRRAKAAGAFSLVAMICVTVALTYGVAQTQKVVTLSPPEDYSLADGVATIKFSQISDGHLHRFEYRAKDGTSMRFIIIKKNGGAYGVGLDACDNCGDAGYYEKDGKIICKKCDVAINLATIGFKGGCNPIPFDYQVKPGKIVIQTSTLDALSSHFQ

SEQ ID NO: 179 - protein, 294 aa, Clostridium scindens
MRQNLKKLGCYIIIIVLLPYVVTVFLNGPSITTYSHVDSTYIKVKSGKKEVKMPIEEYCIGILAKEIPASYDKEALKAQSVLVRTDVYKKIKESGSNTVLEGEFWTQKQMEDAWGAKYSKYYRKLKDAWSETEGQVLLYGEDLALTPFFRLSNGCTRDGAEVLGNGDYAYLKIVDCPLDIENTKQIQTVTVDDMDAEITALDTAGYVINVRVGQENVSGEEFRNTYNLASSCFTLQRYNGKMRITTRGIGHGLGMSQHTANKMSKKGKTYKEILQFFFAGTEIKEVAEILLDTE

SEQ ID NO: 180 - protein, 199 aa, Bacteroides stercoris
MMEESLKVAQGISDFGFMVIVCAVFLCLAAALMIACFKWFKSIINGMIKGNQSMVAELLTETKNQNDMLTDIAEGLRPETQLRIKNTSGIYFDLAIERVCRIIRKVREENHIADHEATKVKIHTLIMNLHEDRNSRFDYYTYRGKRLSSYTSPEWIEWVEQCVWSEVYAESVNNGRTYTNVQTVYDRIKIDFYHKLNQE

SEQ ID NO: 181 - protein, 570 aa, Anaerostipes caccae
MLHVSKEDIMNQFLKENKFLLFVTVLFTVVSSLSYVFIAIVLQKILDIAVIGDKKGFLTTMIFSLFYFLFIGIFAYLQELCSKRFICNALRSVRTKTFEGIERRSTEDFEKYQTSEYLSFITNDVKLLEDNYLIPLLEILQYTIVFIASLAVMIYFSLIITVCVIFAVLLMFIVPGVFGGIMAKRQEAYSEKLADFTGHVKDLLSGFEVIKSYGMKRYALSRFEKSSIQTINAKYSVDKTAAANDALSMLLAVFLQVVVIFLSAYFIMTGRVTPGVLLGMTQASGNLANPLLMILGSIPKLKSVKPIIKRLKNLSEYQERRFIGKTAPSLNKKISIDHLKFSYDSSRNVIDGLSLNIEQGKKYALVGRSGCGKSTLIRLITGCYSKYEGTIRYDDTDLGDLDLRKITELSSVIHQNIYMFNESIYHNICLHQEFTDHQLEEALEASGSAGFISQMADGLSHIAGENGANLSGGQKQRIAVARALIRHKPFLILDEGTSAVDMQTAYDIETRLLKLKGLTLVTITHNMNADIFKMYDEIIYMEDGRISEQGSFQELMEANKRFRDFFELKK

SEQ ID NO: 182 - protein, 326 aa, Bifidobacterium adolescentis
MDDYRSVDGKRTEGEPTMSLKFKSFAALALSAAMMFSVAACGTTDSGDAKSDSKAKNTTVGYDVSTIKKDDELAKLAASAKTVKDGELSVGMELSYAPAEFYAEDGKTPVGYDVDMSKAIAQTLGLKPKIVSSMFDTIVPSIGSKYDLGITAMTITEERLQSVDFVSYYRAGSTWAVQKGNPKKLDTSDMCGAKIAVQTGTVQEDEANKIAKGCKADKKAEVMSYKRQAEAATAVATGKADVFYADSPVAGYAISQTDGQLEALGDVEGVAKQGIAIKKGDQQLDEAVQKAVQKLMDDGTYMKILKHWGVESGALDKAEINPTDLN

SEQ ID NO: 183 - protein, 333 aa, Bifidobacterium adolescentis
MADKTKDAKKDDARMSSIAKTLNKVEDRLEKSENCDSVAEGLANAAKASELLSSVWTLPPTQLLRFHHDTKVSDIDGDSTPGFDGNKDDAERFISISSSEIARYQRLMYANGVKGSHRRLLIVLQGMDASGKGGIVRHVFSQGDPMGMHYHGFGAPKGEELDHDYLWRIKRELPNNGWISIFDRSHYEDIVMPRIYKTQPEEVWQARYDEINRFESQLTADGCAIIKIFLVVSKDEQKRHFLSRLDDPTKYWKFDPSDLEARARWDDYMAAWQDVFLRTSTEQAPWYLVPADNRWYSRAVVSELLRNTLKNMNMIWPPLEVDADEMRRQLDTL

SEQ ID NO: 184 - protein, 591 aa, Bifidobacterium adolescentis
MSNEANERHIADDPSLWWKQAVVYQVYPRSFKDTTGSGLGDIAGVAQQIPYLKRLGVDAIWLSPFYPSQLADGGYDVDDYRNVDPKLGTMDDFDHLTKTAHAAGIKIVVDIVPNHSSNQHKWFKAALAAGPGSPERDRYIFRDGKGPNGDEPPTNWIASFGGSAWTRVPDGQWYLHMFTVEQPDWNWKNPDVRADFIKTLHFWLDHGADGFRVDVAHGLAKDLDRDDLDDFKIIGGEMHCADGTHPLYDRNEVHDIYREWRKVFNEYDPPAFAVAEAWVPPEHQYRYASPEELGQVFNFEFAKKDWIRNDMHLAIEEGIAAAERSGSTSTWVMSNHDIPRHVSRYGLPQVPAAAHHQLAKDWLLRNGTSYHEDRELGTKRARAAILMELALPGSAYIYQGEELGLPEVADIPWDELEDPTAFNRVRDQIEKGRDGCRVPLPWKAGTPTFGFSPATKHEGAGVDASQAGDPCEKPHLPQPQWFADYAVDREDTDSGSMLNLYRKALGLRHEWMTADTTLTWLDCDRSSGKPDGAEGHTGGTIAFRRANGWASVTNFGAEPAELPAGDILLVSGPLTDDGRLPQDTTAWIALG

SEQ ID NO: 185 - protein, 124 aa, clostridium bartlettii
MNFRFCHNNFNVLDLEKSIAFYEKALGLKEVKRKTADDGSFILVYLSDGETYHTLELTWLRDWDRPYNLGDNEFHLALEVEDFDKAYELHKEMGCICFENKEMGIYFINDPDNYWIEILPANMK

SEQ ID NO: 186 - protein, 1022 aa, Bifidobacterium adolescentis
MCGLARLSKLHGVQWNEGLRTEVDMAFVKDMLRMWAHSWKRFISIAMITLLGVAVLTGIYAGCRDAFRSTDRFFDAQGLHDVQVLSTAGLSNGDIAALRKVNGVAKVQAERSQEVTFDLDGRKSATMQEIGTNGIDQPYLQEGRMPKKAGEIAVTRKFIRDSGKRIGSRLTVAPELASSDTSDTSDTNGADGTNETNGTDEAPSFPTKLTIVGVVLDPQNLSNPDGYSAMTSFRSTATTDYTFFAPSDGVTGTLCTSATLLVKGAAAESTFDESYENTVKQVTDRIDGTVKTDRQKARRQELLDAGNRKIADARAEADKKFADAQSQIDANRQQFNQQVDQIVSMQAGAAAAGAAANGANAGAAAAAGATTPQLDETTRETMRETIIAASPELTQAKQQLDQAQSQLNEQKASTEQTLKTKENELKTSIPQVRWYVQDRQSLGGFSALKSDLDSIQSLGNAFPIVFLLVAVMMSLTAMARMVEEDRSLIGTYVGLGYGRLAVASRYLLFALLACLIGGGLGLIAGFLGIPAFLLVVLQGMYVMPGLRLEYDWLYGSLGIALFVVGVLAATIYACVQEMRQTPASLLRPKAPRAGSRILLERIRPVWNRIGFLGKVTARNIFRFKSRLIMTVGGVAGCTALIVCGLAINDTVADLGIKQYRDIYQYDLMVVSDDSDASAMRTKVASDGRVTSSLDVRIESGDLAISGGGDGDSGKAGSSGSESIQLVAVPEKHLSDLGEMVTLQPVSSGILGTSGVGKTGSLKLDDDGVIVAQSAASALGVKAGSKVRLTNGDGVQATAKVGAVNRNLIGSDVYVSETYYAKLFDSKDAKNTKNSKSSEDSEALTWNAMLAKLSGSDTSQTDYAESLEEDSSVMKAVSCAHMADSFKFDLMGAVVALIVALAGGLALVVLFTLANTNVSERVREMATLKVLGFFDREVHHYVNREMMILTVMGVILGLPLGRLVGGMLTMALNMPSLYFEVEVKPLSYVIAAVATMAFALLVQLFVNPVLDRIDPISSLKSVE

SEQ ID NO: 187 - protein, 375 aa, Bifidobacterium adolescentis
MTMSEDKKNGKQNKTVKPFDPMTLRGVTVRNRIWLPPMDTYSALAQDGKPTPFHYQHYVSRAMGGFGMIIMEATAVAPEGRISPCDLGLWDDGQMDAWRWIVADAKAAGATMAVQLNHAGRKGSTGCHAIGFDGQSVPEEQGGWRTVCPSANAYGSLARPRALSVDEIHTIVDQFRDAAWRAMNIGFDAVEVHAAHGYLLSQFLDPLINERDDEYGGSFDNRVRMLVEVVDAIRSVVPDTMPVLVRVSATDWAAGGWDLDQTVELAKILKAHGVDLIDVSTGGLIPDVTIPVKPDYQVPFAEQVRSRAGIPTTAVGLITKPKQAKKILKSGAADAVEIGRAALRDPYWPLRAAHKLDVPVEEAPYQPPYLRGAFR

SEQ ID NO: 188 - protein, 422 aa, Bifidobacterium longum
MPVTTRVWCSVVMVPLASFMCMAQTSFFAQNFAQDSAGYTLMVLCTLLAFPAGFLLLARSEYPEATFWIACALVVVFPYDSLIALMAMTSLLARRSNRNTTIRATVGGTIVTLISQLRDALQQPKASIWHLIFAQPHTGGDSGSPMVMLVEEPTVIITATVASLVFVTIATLIGLHIRSRARLRTANAVASAATTHAATLQTDLTNQQLADAIAAEAHDTLAHSLSLMALNASALKAEAAKLGDSPEAQSLADKAEDIRRQSAGALDEAHSIIDMLRNPHQAWEQLAPSDDTSLTRESLDALIADTRNSGTSLNTWIDIQQLSVMDESIGKVAYRAIQEGLTNARRHAPGAPVSLEVSATPQAGVHIHISNPIATDATETQRAHGAGLPGLAARVHSVNGQCRYGMDDRHLFHVDVQLPWRS

SEQ ID NO: 189 - protein, 324 aa, Bifidobacterium adolescentis
MKLDMKSKKNKANSHRGRGKEIAYPDTSDGQKGTLLSMNVSDISNALKAGGIGKRSTAPENPADWTMRANLIPRSIVGLNRDRAIKYLLTYVLIGVLIVSLVVSVFMFAQSTWADHRVEVAQQKTISLQKEKAQFKDVEDTLNSLDDAQKAKIAMLYDEMDWMKVADSLNSSLPEGGQYTNLELKSFQIASSNNSSSSSDNTSTVWSGNGVISADFTIESPNFYSAKDFINNFASIPTYKTGYVSSITKNDSEGGTTYTYTGTISLVMDGNTTSRSDNSAGATQANRDLLAKLRASLDKAASGQSDASANQSTDTSSDASGSSN

SEQ ID NO: 190 - protein, 214 aa, Bifidobacterium adolescentis
MKETDMTQETESLIASDEDLTKLFAGKPTQYRKSKSLPKFTGEAMRACAKINRIFFDDPDEAYRLFHELVPDAGEGVQFTPPFNVDYGIGLTIGRGTFLNKDFMVCGGGYVTLGEDCLIGPRCTIATPNHAKDAATRLAGWEHASAVTIGDNVWFGANVTVTPGVTIGSNSIIGAGSVVTRDIPENVIAVGNPAHVIREIPEHDPAFADVEGLL

SEQ ID NO: 191 - protein, 218 aa, Clostridium scindens
MGYNVAIDGPAGAGKSTIAKLVAKEKGYIYVDTGAMYRGMAIHFLDKGIRAKETDKIISALKDAEVTIRYEEGLQQVYLNGRNITDRLREEEVGKMASLTSAIPQVRQKLLELQKGLARTQDVIMDGRDIGTCVLPDADVKIYLTASVETRAKRRYDELTEKGIACDLDEIERDIKERDERDSTREIAPLKQAEDAVLVDSSHMTIDEVVAAIVKLCR

SEQ ID NO: 192 - protein, 471 aa, Bifidobacterium adolescentis
MRQSEALAILGSGASVFLTGAPGAGKTYVLNEFIRQARADGASVAVTASTGIAATHINGTTIHSWSGIGLATALTDNLVKTVRTRRKRKLQEADILIIDEVSMLHAWLFDMVDRICRIIRRDERPFGGLQVVLSGDFFQLPPVSVSGRNNDLIAPSAEYLASRERYMRAGLNPEGFVTESLVWRELNPVVCYLTEQHRQDDGQLLNVLTDIREGAVDDGDRNVLLTRLGAIPEPGQQAVNLFPVNRQADALNDLRLFEIKEEPHEYLAESEGAANLVERLKKNMLAPERLYLKTGAAVMAVRNDTDHQYVNGSLGTVRGFTTQSQGGWPIVEFENGNIVTMKPNSWQMQDGDAVLATVKQVPLRCAWAITIHKSQGMTLDRAVMDLRRTFAPGMGYVALSRVEGLDGLYLQGVNERMFLVSPDAVRLDGQLRLESAQAADTLASDGVGAFRARMPQPAAGEDDEFAQDVLF

SEQ ID NO: 193 - protein, 151 aa, Ruminococcus torques
MTDAQAKQINEMRMKGMGYKAIGMAIGLSRDIVRNYCKRHNLAGYATVVSKNMKLMVDGKEVCHFCGNPITQPKTGRPRRFCCEKCRREWWKAHPEAVKKSEKASYTLVCEQCGKPFISYGNKNRKYCGRECYFRHRFLAEEDMEDAVSEL

SEQ ID NO: 194 - protein, 149 aa, Bifidobacterium adolescentis
MKTFTPKPADLTHDWYVIDATDVVLGRLATQAATLLRGKNKPTYAPHADSGNHVIILNADKIALTGNKLGKELYMHSGRPGGLRRDSYAQLLKTNPERIIKSAIKGMLPKNRLAKVQLDRLHIVRGAEHPYAGMKPQVFEIAQVSQQAK

SEQ ID NO: 195 - protein, 219 aa, Bifidobacterium adolescentis
MREGAHMRVVVEGLAHRFPGTDLLFEHLDFVAEPGSTIAVCGPSGCGKSTLLSILAGWEKPYAGTVTREGVNRVGWVFQNPYGVAERTALDHVVFPLLAKGMRRKEAELKALEAMGLFDLEYAADRRFSDLSGGEAQRLMLARAVCSKPDMLLVDEPTAQLDTRTAHSVSHVLNNLSGQGMIVLVATHDPDTRDACDRVLDLADYAPGGSKSQEPELEE

SEQ ID NO: 196 - protein, 478 aa, Bifidobacterium adolescentis
MRWCYEQALREGRPVPSKPARLPLLRPTYGREVAGVAKAISIHLGVSVHLIRFIFVVTTFFFGAGAIAYIFLWITVPVGDPVQQAYVIAGSQPVENAPLSHGNVRNVRNLRNVGNGGAQSQDSDGNADGMQSGSGAQSSESLEQMFANAPRPALLAMAGLLMLGLCVAMAAKGIEGTLIVPLLLGVVGVGVSWLRFNAKDGQLWTMLGGIAVIFVAYAIYIATHVRIMQSARHATFTMLVAGLALLVGVLLAIVPWIMTLVRDLGTERALKEREEERADMTAHLHDGVLQTLALIQLHADDQQTVFSLARQQERELREWLYQERTTSDRSVNAGLKQIAAHVEDTHGKPIEVVTVGDARPSAQTDALLDATQQALVNAVTHGGEPVSVYCEAGDKLVEVFVRDHGDGFDVDAIPANRLGIRESIIGRIKRRGGTVEIVSRPGWGTEVRMHMPISGAAEDADSATTTTADGDTGVQSAQ

SEQ ID NO: 197 - protein, 185 aa, Ruminococcus gnavus
MISAGDFKNGVTVEIDGNIYQILEFQHVKPGKGAAFVRTKLKNIISGGVVEKTFRPTEKFPKAHIDRKDMQYLYRDGDLFNFMDVETYDQIALNEDVVGDSLKFVKENEVVKICSHNGNVFSVEPPLFVELAITETEPGFKGDTAQGATKPATVETGAIVMVPLFVEQGDVLKIDTRSGEYLSRV

SEQ ID NO: 198 - protein, 121 aa, Bifidobacterium adolescentis
MERLKSHRDFVAVLKRRRRVSREDIVVHYLMHDDVVTGDTATVQGRRVGLAVSKAVGNAVTRNAVKRRFRVLARKYESLLPESCDIVLRAKPSAARADFLSLEQQMASCFEAVKRKTASRQ

SEQ ID NO: 199 - protein, 202 aa, Clostridium scindens
MTVGEKIKYCRKQIGITQDKLAELTGIHPVSIRKYETNKMQPQPPQLEKIAAALGVSYNALNGSDTAGLRLETVGDLMGILMVLCNSSILQISGERGEDKLLKDNTVSIRLNPVLSSYLEIGYTVRGKTHTLSLQDALLNIRSYKVFNDLLKWEKMNYLYQSALKSAGDNPNEATQAAIDEITETKEKVELELQKSQMALCF

SEQ ID NO: 200 - protein, 171 aa, Bifidobacterium adolescentis
MGGMAKKKHEKGAGSTPATVQLEKAGVPFKTYEYAHSNDHMDDGYGVEAATKLGFDEHQVFKTLMADTGSERVVGVVPVSGHMDLKALAAAVGAKKAAMADPKVAMRESGYVVGGISPLGQRTHHKTVLDESALQYDEILLSGGKRGFSVGVNPNDLLKVLDAVAAPIGTW

SEQ ID NO: 201 - protein, 229 aa, Clostridium scindens
MNILVTENLKKYYRMGENVVKALDGVSISIQQGEFLAIVGKSGSGKSTLLHMLGGLDRPTSGKVMIEQKDISSMDKDELTIFRRRKIGFVFQNYNLLPLMNVYENIVLPIKLDGIRPQKRYVNEIIEMLGLGDKKSAMPSQLSGGQQQRVALARALAAKPAIVLADEPTGNLDSRTSQDVLGLIKTSSERFGQTVVMITHNTEIAQMAGRIIRMEDGKIRGGGKAYDED

SEQ ID NO: 202 - protein, 113 aa, Bacteroides stercoris
MDNNGYRLLLPEGTLDYFIISDVKESASEIVIYLEEKNEVPKEYAGMKVESKGFYEPVVVQDFPIRGKKLFLNVRRRRWVVKDENRYVSRDWKLVAGGSRMTHEFASFLKELY

SEQ ID NO: 203 - protein, 286 aa, Anaerostipes caccae
MIASSVNWNVVLNHYTDQILDFALNILVALIIVGVGFKLSKWLVSLFRKGMEKRKVDLGVVTFSCSFLKIALRCIVIFMAVERLGVKGTSIVALFGSAGVAVGLALQGSLSNIAGGVLLLILKPFQVGDYIVVDGTGCEGEVASMDIFYTKLKTVDNRVIVIPNGTLSNSNLINNTKQDSRLIDLKIGIAYDSDIQKVKETMLGVAKKEHMTQDENIQVFVSDLADSSVIMGLRAWVSTEVYVSTKWSLLEHIKDAFDREGIEIPYNKLDVNVTEIKGTDREQATV

SEQ ID NO: 204 - protein, 314 aa, Bifidobacterium adolescentis
MKLVEGQLIHRRYRLDSRLAQGGMGEVWKGYDIQLGRPVAIKALRGDLGVTQEAKLLRLRAEAHNSANLAHPNIAALFEYYEHDGIGFLIMEYVPSKSLADLYHEQNGPMDPIKLLPILIQTARGLFVAHSHGVIHRDVKPANIMVSDSGEVKITDFGVSYSTNQEQITQDGMVVGTAQYISPEQAQGKHATPQSDIYSLGVVAYEGLCGHRPFTGATPVDIAAAHVNNPVPPLPDTVDVQLREFVMSMLAKDPLDRPKDALVVSRTLSRIERRLLDQQTQLADTMVVSSGGRLPRRVVSKPHISVSNDWKEQG

SEQ ID NO: 205 - protein, 166 aa, clostridium bartlettii
MDKMYRVGIITASDKGSRGERVDESGAKIKEVVGEFGYEVKFYKVLPDDKDVLAEEMKSLCDKNEVDLILTTGGTGFSKRDNTPEATLSIAEKLVPGISEAIRAYSMQFTKKAMLSRAVSVIRKSTLIINMPGSPKAVKECMECLMPALEHGLDILTGEASECARK

SEQ ID NO: 206 - protein, 122 aa, Ruminococcus obeum
MESRIKQLREKRGLIQEILAAELGITQQMLSKYERDVTFIKVDILKKIAVYFNVTTDYLLGLSEVKRDLQGQMKVNETLDEYYDLVEIYKNLDKYDQEMIWSIIQIIKKLDEKRKREQKRVD

SEQ ID NO: 207 - protein, 629 aa, Clostridium spiroforme
MKITELLDVKSIALNVNVSSKDETIDKLIDLMYESGKISNKSEYKKGILAREALSTTGIGDGIAIPHAQVATVKKAGLAAMTIQNGVDYDSLDGKPVYLCFMIAAPQDGGSIHLQALAKLSTLLMNEDFRNELMNAKSAEQFIEIINQEEAKKDAQEKNVSKKEEYRVLAVTACPTGIAHTFMAAENLTKAGKEMGYPLKAETNGADGAKNVLTAKEIENCEGIIIAADKNVEMARFDGKPVLSVSVTQGIQKPEELIQKVIDHQVPVYHHDGSTVETIENSEGVGRSIYKHLMNGVSHMLPFVIGGGILIALAFLFDDYSIDPANFGKNTPLAAYLKTIGEQAFGLMLPVLAGYISYSIADRPGLAVGFIGGMVAKMGCTFTNPAGGDVNAGFLGALLAGFVGGCLVIGLKKVFSKLPQALEGIKPILLYPVIGILLVSVITTFINPFVGAINDALNGFLNGMGGTSKVLLGMIVAGMQSTDMGGPINKASYVFATSQLAEGNFEIMAAVMAGGMIPPLAIALSTTFFKNRWTKDERNSGLVNYVMGLAFISEGAIPFAAKDPLRVIPSCIVGSAVAGALSMFLGCTLRAPHGGIFVLPTIGNPLMYALAILIGAIAGCLVLSILKKH

SEQ ID NO: 208 - protein, 388 aa, Clostridium ramosum
MSKLNELINELCPDGVVLKPLFKLVTINTPSIKILSKNILITGDYPVINQGSDYISGYTNDKTALFPKNEYIIFGDHTEIIKYVDFPFAQGADGIKILTSKNINCKYLYYCFVNFYKTTGKYTRHWSAAKNTLIPFPPLPVQEEIVRILDNFTELTAELTAELTAELTARKKQYEYYRDSLLTFGDDVERKPLREIATIIRGGNFQKKDFTEKGIPCIHYGQIYTRYGLSATKTITFIDGDVAKKSKFANTNDIIMAVTSENIEDVCKCVVWLGEEKVAISGHTAIIKHNQNAKFLAYYFHTAMFFKDKKKLAHGTKVIEVTPSKLGDIIVPLPSLSEQQRIVDILDRFDTLCNDISKGLPAEIAERQKQYEYYRNKLLTFKNINAEV

SEQ ID NO: 209 - protein, 236 aa, Bifidobacterium adolescentis
MSTAAGKKIAIVTGSALGLGYELARQLIGKGWFVAGIDFNTARQEELSRTFGADEYRAFVGDISDEAFVKDSVAAIKEIGHIDLLINNAGQPSFKKPVDYEAADVDKCLKGLKGMILWSVETLKADGEQDLKIANVMSTAATRGNANESVYCATKWGEKGYTTSLKAAYKGTSVKVVGVYPGGIDTDFYHDSHDYVSLDKQHSFMSAAELAEVVLFNLVNDANLTVSDILIERNYR

SEQ ID NO: 210 - protein, 67 aa, Eubacterium ventriosum
MEITIKDDFIKLGQALKLAGLVDSGVDAKFVIQDGQVKVNGEVDTRRGKKLYAGDTFEFEGTVVTVK

SEQ ID NO: 211 - protein, 825 aa, Bifidobacterium adolescentis
MTSPVIGTPWKKLNAPVSEEAIEGVDKYWRAANYLSIGQIYLRSNPLMKEPFTREDVKHRLVGHWGTTPGLNFLIGHINRLIADHQQNTVIIMGPGHGGPAGTAQSYLDGTYTEYFPNITKDEAGLQKFFRQFSYPGGIPSHYAPETPGSIHEGGELGYALSHAYGAVMNNPSLFVPAIVGDGEAETGPLATGWQSNKLINPRTDGIVLPILHLNGYKIANPTILSRISDEELHEFFHGMGYEPYEFVAGFDNEDHLSIHRRFAELFETVFDEICDIKAAAQTDDMTRPFYPMIIFRTPKGWTCPKFIDGKKTEGSWRSHQVPLASARDTEAHFEVLKNWLESYKPEELFDENGAVKPEVTAFMPTGELRIGENPNANGGRIREELKLPKLEDYEVKEVAEYGHGWGQLEATRRLGVYTRDIIKNNPDSFRIFGPDETASNRLQAAYDVTNKQWDAGYLSAQVDEHMAVTGQVTEQLSEHQMEGFLEGYLLTGRHGIWSSYESFVHVIDSMLNQHAKWLEATVREIPWRKPISSMNLLVSSHVWRQDHNGFSHQDPGVTSVLLNKCFNNDHVIGIYFPVDSNMLLAVAEKCYKSTNKINAIIAGKQPAATWLTLDEARAELEKGAAEWKWASNVKSNDEAQIVLAATGDVPTQEIMAAADKLDAMGIKFKVVNVVDLVKLQSAKENNEALSDEEFAELFTEDKPVLFAYHSYARDVRGLIYDRPNHDNFNVHGYEEQGSTTTPYDMVRVNNIDRYELQAEALRMIDADKYADKINELEAFRQEAFQFAVDNGYDHPDYTDWVYSGVNTNKQGAVSATAATAGDNE

SEQ ID NO: 212 - protein, 627 aa, Bifidobacterium adolescentis
MGRAVGIDLGTTNSCIATLEGGQPTVIVNAEGARTTPSVVAFSKSGEILVGEVAKRQAVTNVDRTISSVKRHMGTDWTVEIDGKKWTPQEISAQVLMKLKRDAEAYLGEPVTDAVITCPAYFNDAQRQATKDAGTIAGLNVLRIINEPTAAALAYGLEKGKEDERILVFDLGGGTFDVSLLEIGKDDDGFSTIQVQATNGDNHLGGDDWDQKIIDWLVGEVKNKYGVDLSKDKIALQRLKEAAEQAKKELSSSTSTSISMQYLAMTPDGTPVHLDETLTRAHFEEMTSDLLGRCRTPFNNVLRDAGISVSDIDHVVLVGGSTRMPAVKELVKELTGGKEANQSVNPDEVVAVGAAVQSGVIKGDRKDVLLIDVTPLSLGIETKGGIMTKLIERNTAIPTKRSEVFSTAEDNQPSVLIQVYQGEREFARDNKPLGTFELTGIAPAPRGVPQIEVTFDIDANGIVHVSAKDKGTGKEQSMTITGGSGLPKDEIDRMVKEAEAHEAEDKKRKEDAETRNQAESFAYQTEKLVNDNKDKLSDDVAKEVTDKVNELKEALKGEDIEKIKSAQSELMTSAQKIGQALYAQQGAADAAGAAGAAGAGAAGSASNGSDDDVVDAEVVDDDDKDNK

SEQ ID NO: 213 - protein, 279 aa, Bifidobacterium adolescentis
MHLGSVGVSRNGGRTAKGWNIAICMLLASVLGLCLMLWITPPVHADDSAGLGITATDDITDTQNLLGSNVSEITDAINQTKKETGVTVRLVYLDSFNAKGKPDKWVSALLESLNPKPNTVMLAVASNDGNLVVAVSSNSEEWLKKKSTVDALSDAAQKPLMESDPDWAKSATDMMNQISVQKKTSTSSRTIWIGVGGFAGALLLLVVILVVFHILRKKDVIGHRRKGRHSGRHGAVAERIQPVKEWGAESENEDYVNPDTASTQDSESVQETSSEGSDA

SEQ ID NO: 214 - protein, 228 aa, Clostridium scindens
MSILAARELKKYYGKGESLTKTLDGVSLDIEKGEFVAIIGASGSGKSTLLNMIGGLDISTSGKVMIGGKEMDQLSADELTVFRRRNIGFIFQNYNLIPVLNVMENITLPIELDGKKPDKKFIQQIIGLLGLTEKVQKMPFQLSGGQQQRVAIARALASKPSIILADELTGNLDSETSDEVMKLLKMTSEKFHQTIIMITHNPEIAEQADRMIRIADGKIVEGECHAGR

SEQ ID NO: 215 - protein, 365 aa, Anaerostipes caccae
MNHYKLLTPGPLTTTDTVKQEMLFDHCTWDEDYKNITQTIRKQLLSLAHVSEDDYTAVLMQGSGTFGVESVITSVINENGKLLIIANGAYGERMADIAEHAGIPYEIYREDYRKVPQAAVVEKILREDPAITHAAMVHSETTSGILNDIEAIASVVKEYNKTLIVDAMSSFGGVDIEVGQLGIDFLISSANKCIQGVPGFSFIIADKKKLSDSKGNARSLSLDLYDQWETMEKDGKWRFTSPTHTVLAFAKALKELEAEGGIAKRAARYRENNRILIERFQSMGMQPYIDGAHQGPVITTFLYPADTDFTFSEMYHYIKERGYAIYPGKVTEAETFRIGTIGEIYPEDIEKLSEIMEQFLKEKEQ

SEQ ID NO: 216 - protein, 410 aa, Ruminococcus gnavus
MSQFFRKGGIALNDTEWIQDFADRRLQYGVSQTKLAVMAGISREHLSRIESGKVAVTEEMKAKLLEALEKFNPEAPLTMLFDYVRIRFPTLDIGHIIKDILQLNIQYMIHEDFGHYSYTEHYYIGDIFVYTSPDEEKGVLLELKGKGCRQFESYLLAQERSWYDFLMDALVDGGVMKRLDLAINDHTGMLDIPELTEKCRNEECVSVFRSFKSYASGELVKHEEQDKAGMGYTLYIGSLKSEVYFCVYEKSYEQYIKLGIPIEEAPIKNRFEIRLKNERAYYAVRDLLTYYDAERTAFSIINRYVRFVDKEADKKRSDWKLSVRWAWFIGENREPLKLTTKPEPYTLDRTLRWIQRQVDPTLKMLETITAKTGVDYLKEIRKSTKLTEKHYKIIEQQTTSTEDVILEKEN

SEQ ID NO: 217 - protein, 488 aa, Bifidobacterium adolescentis
MNKSLRQLFTIVVALFVILGMSTTIIMAIRANQLTNDARNVRALYHEYGAPRGSILAADGSVIAKSDPSNDSFSYQRSYSAGELYAPVTGFFSISQRGWSGVEASRSSLLSGQSEQLLWQRFKSLFTGQENKGANIETSIDPKIQQAAYNSLGSTDGAAVAIEPKTGRILAMVSTPSYDPNQLASHDMSQANSNYGVLSQDATNPMLNRATSQLYPPGSTFKTVVAAAALETGQYQPDTQIPAGASYTLPGTVTQLTNDVPQADGADGKISMEDALAYSSNTAFAQLGVSLGDNAVSSMAKKLGFDSPITVDGSDYTGTPWVSVTSKFPTDINDDKLALASIGQGDTVVTPLQNAMVAAAIANDGKLMQPTLVDRVRSADLSVISQTKPTVMSHAFSADTANKLTQMMEAVVTKENTNLAINGVQVAVKTGTAQIGNGNTSIDGWVIGFAPADDPKIAVAVVVHNVDLYGSFAAGPIMKAMMQEALAE

SEQ ID NO: 218 - protein, 497 aa, Bifidobacterium adolescentis
MTTDVQNTTAAGVTAHDWGWRHASRKDFALRHVDFNIKPGERVLLLGASGAGKSTLMSGLAGVLGGDDEGEQEGELLIDGVDARHARGRCGLVLQDPDSQTILERAGDDTAFGCENLSLPKDEIWNRARAALDIVGLDYMAFDRSTRGLSGGQRQRLALAGVLAMHPGLLLLDEPTANLDPDGVKEVHDAVRHVLEQTHETLVVVEHHIDVWLDLVDRVIVLGKPEADSNVGGVIADGTPDEVFGHMGQVLADGGAWVPGRTIESHAPKPEQIRQPQDVVLYTRDLSFGYDFPLGEHIDLEFHSGEVTALTGRNGVGKSTLGLTLAGLLKPIAGRVCMADDLVPPHRENNVITWKSRDLLGRIGMVFQEPEHQFAASTVRDEVAIGPKSMGKTDEEAYSIADRLLERLNLSRFAKANPFTLSGGEKRRLSVASMLAAAPKVLVMDEPTFGQDFTTWTSMVQLIAGARDQGCAVIMITHDEPLIEALGARRILVREGE

SEQ ID NO: 219 - protein, 278 aa, Bifidobacterium adolescentis
MIDEVLFLRHGRTAYNLARRLQGQIDIPLDIVGRWQADQSAYELAKTYYWAKVAHLAEHNDQLAQPAYGNAHLADVDEINNAPAAARRMLVVSSDLFRAQQTAHAFADLMGLDVELDPRLRERSFGEWEGMTREEICEHYADDYHSWRAHTGGETKHGVESRIHTGRRGAEAVRDIVAKHHDETMPTTLLLVGHGSWIVATVAVLLDMDPDDLNNVGAMRNAFWTRMTPHTDPRNADRPTWKLEEFNQGPAIASFADWENGPESLRAPGMPLWKPIIQ

SEQ ID NO: 220 - protein, 139 aa, Clostridium scindens
MMIFTIDDDGVPICKMGLRMHKDGYEAAKHRAKYRCPKANRKYGCFCEHPCSPAKYGRTVHIFTDDNPRLFNIPPRDSKAWKKEYDGRTSVERSNKREKEDYKLEYGRHRSTKMWYCRLYGIMMLQHLDAWETFQKSLG

SEQ ID NO: 221 - protein, 173 aa, Dorea longicatena
MTDTHISERYEFRNIKQNEAEEAAEIERICFPPNEACSKKHMKDRVAGIADLFLVAIDKENGKMAGFLNGLATDDEILKDEFFTDASLHNPEGKNVMLLGLDVLPEYRSQGLARELVHRYLEREWGRGRKEIILTCLESKVAMYEKFGFKDKGIAQSTWGGEEWHEMSVKNQN

SEQ ID NO: 222 - protein, 264 aa, Eubacterium dolichum
MRWKGAILMEHILNLEQVKKYYGSNSGNITKAVDGISMYVDKGEFVAIMGASGSGKTTLLNCISTIDTVTSGHITVNNQDITKIKDKDFADFRRENLGFIFQDFNLLDTLTMEENISLSLVINKANPADIEKRVHAIADKLGIQDILSKFPYEVSGGQKQRCACARALINEPKLILADEPTGALDSKSSRLLLETMSDINKKMQATILMVTHDPFSASFCERILFLKDGKLFNEIFRGEKSRKDFFNEILDILTLLGGEVGNVR

SEQ ID NO: 223 - protein, 1110 aa, Bifidobacterium adolescentis
MKPPNEEHTVSESTNHVYPKAAAGEQSANVAPNPSFPKLEESVLDYWDKDDTFQKSIERRPSGDHSQNEFVFFDGPPFANGLPHYGHLLTGYAKDVIPRYQTMKGHRVNRVFGWDTHGLPAELEAQKELGIDSVDQIKELGIDKFNDACRASVLKYTNEWKDYVHRQARWVDFEHGYKTLNITYMESVMWAFKQLYDKGLAYQGYRVLPYCPKDQTPLSAHELRMDADVYQDRQDTTVSVAVKLRDEEDAYAVFWTTTPWTVPTNFAIVVGADIDYVEVRPTEGKFAGKKFYLGKPLLGSYEKELGENYEIVRELKGAEMEGWRYYPVFPYFAGDENAVEGKVPGPEGYQIFTADYVDTVEGTGLVHQAPYGEDDMNTLNAKGIKSIDVLDAGCKFTSLCPDYEGLYVFDANKPILRNLRAGDGPLARIPEEQRAILFQEKSYVHSYPHCWRCATPLIYKPVSSWFVAVTKIKDRLLELNQQINWIPNNVKDGQFGKWLANARDWSISRNRFWGSPIPVWVSDDPKYPRVDVYGSLDELKADFGDYPRDKDGNINMHRPYIDELTRVNPDDPTGKSHMHRISDVMDCWFESGSMSFAQYHYPFENKETFEQHFPCDYIVEYIGQTRGWFYVQHVMATALFDRPAFKNVICHGIVLGSDGQKMSKHLRNYPDVNGVFNDFGSDAMRWFLMSSPILRGGNLIVTADGIRDTVRQVMLPVWSSYYFFTLYANAAGYDARKLRADEVAKLPEMDRYLLARLRRLVEKTQHALDNFYISDACDAASDFIDVLTNWYIRNNRERFGAGDENAFNTLYTVLETFMRVLAPLAPMEAEAVWRGLTGGESVHLADWPFLADEKTGETTELGAVLQDDAKLVDAMEKVREVVSGTLSMRKAKQIRVRQPLAKLTVVVENPDAVAAYSDVLKGELNVKDIEFCTLEDAGSQGLKIVNELRVNARVAGKRLRKDVQFAIKASKSGAWHVDAAGVPVCETPNGEIALEEGEYELINRVEEENAQEAANSVSAALPTGGFVILDTELNDDLLAEGYARDVIRAVQEARKAAGLEISDRITLKVTVPADDVAKVEQFKDLVAHDTSSDSVSVEAGAELGVEVAKV

SEQ ID NO: 224 - protein, 334 aa, Ruminococcus obeum
MKLRHLFFACSGVFVMMFSLLLLVVIVFSDEEDGGSGGNLIYGGVSVSQEVLAHKPMLEKYAREYGIEEYLNVLLAIIQVESGGTLEDVMQSSESLGLPPNSLSTEESIKQGCKYFSELLAAAETKGCDLNSVIQSYNYGGGFLDYVAGRGKKYTFELAESFAREKSSGKKVTYTNPVAVEKNGGWRYSYGNMFYVLLVSQYLTVAQFDDETVQAIMEEALKYEGWTYVYGGDSPSTSFDCSGLVQWCYGKAGIALPRTAQEQYNVTQHIPLSEAKAGDLVFFHSTYNAGTYITHVGLYVGNNRMYHAGNPIGYADLTGSYWQQHLAGAGRIKQ

SEQ ID NO: 225 - protein, 705 aa, Eubacterium eligens
VEEKMKRSKNLLRKGAALAAMSTVLVSQVPLINAFAYGEADVSQSTFKQDTDNSADFQNWLSNVWQGGEKAYAQTENVALTPGSDAADLNFSWYSAGKGTPAVKVWKDGSKSSAKVVTGNAEAISAENWQGKSYSAANKVNIADYFEENTQYHYQYTDNYTGDDSIWSAEYDYTTKATDKFSVILTGDPQVGASGSSSDYSANDASVARDAYNWNKTMQQALKTCPDASFLLSAGDQINQSGATKDNDKKTRESEYAGYLYPSVFRSLPIAATIGNHDMAGSDYSAHFNNPNSEDKLGSTAAGSDFYFNYGDVLFISLNSNNRNQEEHRTFMNKAVASNPDAKWKVVIFHSDIYGSGQPHADTDAATNRIVFAPLMDEFNIDICLTGHDHTFSRSYQILDGNVVDYDISSGSVTNPDGTLYITTGSGSGSKYYNLLNYTPYYIAERTNACLPSFSTIDFSSGSLTIKTYDYNGNKYADDFTINKTNTDMSVDEVINNAEALINGTEVNYTEDSMNSLKDALSALKQIKAAYTTASDPMIADITTNYGKDTDRVSGYGSVKNAADKSTSESGKSVNRFKKGVSTLLDKTIYIQAQEGAQAQLADYKSENAPKIDAKALEDAKTAVVNAINALTVQDDNDTVTEPSAPAEVSSADNSSTDNSSTDNGKAPQTGDNMLARVYACMAAAAAGIGAVIVGIRKKEDICER

SEQ ID NO: 226 - protein, 310 aa, Bifidobacterium adolescentis
MGVMTLLQLKYIVKIVECGSMNEASHELYVSQPALSSSVKELENELGIEIFTRSSQGIALTVDGAEFLTYARQVLDQASLLEERYKNAKPRKQLCSVSTQHYMFAVEAFVEMIDSTKSDEYEFTIRETRTKDIINQVANMLSEIGIIYLSDFNKDVIGKLLREKHLEFHPLFRAPLHVFISRDNPLAGKKKVTMDDLKPFPFIQYEQGEEGSFFFAEEAVWPEYSPKQINVTDRATILNFIIGLNGYTVCTGIDNGDLNNEKIVTVPLDTDETMLVGWITNERAKLSKAAETYLEKLKSVVASHGYTLID

SEQ ID NO: 227 - protein, 140 aa, Ruminococcus obeum
MSKVAVVYWSSTGNTEAMANAVAEGAKAAGAEVISFESADFSADKVDEFDAIAFGCPAMGDEVLEEDEFEPMFNSCETKLSGKKVGLFGSYGWGDGEWMHNWEDKCKEDGAVLVADGVICQEEPDDDAVENCKALGKALA

SEQ ID NO: 228 - protein, 1244 aa, Bifidobacterium adolescentis
MVFRVYVEKKPGFDVAAQQLANELRTILGIEALKNVRLVNRYDVEGISEELFAQATPTVFSEPQVDNVYADLPDFGSDTVFAVEYLPGQFDQRADSASECIQLISQGERPTVRSAKVYALEGELSEADVEAIKHYVINPVEAREASLDVKTTLKTQVPVPGKVEVIDGFRSMSDAELEQFIEDRGLAMDLADLQFCREHFTEEQRDPTITEIKVIDTYWSDHCRHTTFGTQLDEVSIDDATVKAAFDKYLEMRHELGRDAKPVCLMDMGTIGAKWLKKNGILKNLDESEEINACTVKVKVDVNGHDEDWLFLFKNETHNHPTEIEPFGGAATCIGGCIRDPLSGRSYVYQAMRVTGAADPTVPVSETLEGKLPQRKLVTTAAAGYSSYGNQIGLATGQVNEIYHPGYVAKRMEVGAVVAATPADHVRRETPAPGDKVILLGGRTGRDGIGGATGASKAHNVESLELDGAEVQKGNAPVERKLQRLFRRGDACRLIKRCNDFGAGGVSVAVGELADGLYVDLNKVSKKYEGLDGTELAISESQERMAVDVAAEDVDEFLGYAKEENLEAEVIATVTEDPRMTMVWNGDTIVDLSREFLASNGAPKHQVVHVEAQHGYTTPWTSGTLSERMHTMLTDLNVASNKGLSERFDSTIGAGTVLMPFGGRKQLTPNMAMVAKLPVFGETTTASAMAWGFNPYIMEQNQFTGAYLSVVESLSKLVAAGFEHEKAYLSFQEYFEKLRDEPERWGKPMAAVLGALMAQVDLGAGAIGGKDSMSGTFEQLDVPPTLISFAVAVGNMKRATSPEFKGAGHRVVRIAPRYKADGLTPDKDALLEVFSAVEELTDFGDALAVSTPGYGATAEAIFKMTVGNQIGMKLDDGIAVDDLFAPAYGSFIIELADNAKVPAVSNLVEVSEVGETTEEYSFVAAGETLDLAELQDAWEGSIESVFPYRSKGEEKGKTVETMSFDAPKKTVYTGTGVAKPHVIIPVFPGNNCEYDSAAAFERAGADVSTLIVNNLTPAAVAESTNALVEEIKKSQIIMIPGGFSGGDEPDGSAKFITAFFRAPAVTEAVRDLLNNRDGLMLGICNGFQALIKLGLVPYGDIVPMTAECPTLTFNTIGRHQSRLVRTRVASNLSPWLAKTEVGDMHTIAISHGEGRFVASDDVLAQLKANGQIATQYVDEAGVPGMDLDVNPNGSLLAIEGITSPDGRVFGKMGHSERYSNGTFVNVPGEKDQPLFAAGVEYFAA

SEQ ID NO: 229 - protein, 298 aa, Dorea longicatena
MDRIFFTNSGGEAVEGTLKAARKYAYKKGTGRYEFIAMKESFHGRSFGALSVTGHDPYRAPFEPLVPGVSFAEYNDLDSVKALVTDKTCAIILEPLQGEGGINLATEEFMKGIRKLCDEEGILMICDEVQCGMGRTGSMFTWQSYGIRPDIMSMAKAIGSGIPVGAFAMTEEIAKYSLEPGDHGTTYGGNPLACTAVSKTIEIFEKKNLVAHVQELGAYLTEKLEELKSECDCVKAVKGKGLMQGIQVTKPLSEITKEALKEGLLIIGAGNDVIRFVPPLIIEKEHVDEMIRILKKVL

SEQ ID NO: 230 - protein, 397 aa, Ruminococcus gnavus
MTFNQTPSAERIHIGIFGKRNAGKSSLINALAGQPVSIVSDFKGTTTDPVKKAMELLPLGPVVLIDTPGLDDTGELGSLRIEKTQQILNTTDIALLVIDGQLGITEEDIQILQQIRKKQIPFVIAVNKMDLAPASPVLPDEISPEQVLYVSAAAGTQIHELKELLAKQLGQTPKTRKIVGDLIHPGDFVVLVIPIDKAAPKGRLILPQQQTIRDILDHGATAIAVRDSELSETLKNLGKSPALVITDSQVFDAVAKIVPKEVPLTSFSILFARYKGNLALAAKGAQTLDTLKDKDRVLICEGCTHHRQCEDIGTVKLPRMLKQFTQKDLQFTFTSGTDFPSDLSPYQVIIHCGGCTLTEKEMQYRLDCAREQGIPITNYGIAIAYMRGILERSMELF

SEQ ID NO: 231 - protein, 108 aa, Dorea longicatena
MYDKSQLMKGTLEGCILQILSETVTYGYEIVTTLEEFGFEDVKEGSIYPLLVRLEKKGMISSELRSSPLGPKRKYYSLTDEGQAYLKEFIKCWTEVQSSVNRILKKEK

SEQ ID NO: 232 - protein, 148 aa, Ruminococcus torques
MVRIMTIEDYEGVYALWKKIKGFGIRSIDDSKEGVARFLKRNPTTSVVAEKDGRIVGSILCGHDGRRGCLYHVCVDEDYRRHGIGKRMVVFAMKALKEEKINKVSLIAFTENDIGNAFWNTIGWTERLDLNYYDFTLNEENITAFNGQ

SEQ ID NO: 233 - protein, 488 aa, Clostridium scindens
MLEKIKKTFQNRTSRNGSYSVGLIALVVGIVVAVNLIAAQLPENIRKIDISDNKIYEISKTSKKILEELDHKVTFKVFAEKDSADERIRTFLKKYAALSDQIKVEWIDPVLHPSALKDNNVEANTILISCKDTGKTTTVAFDKIIVVDEYSYYTTGNATESEFDGEGQLTSAIHYVTSDTQKKVYYTTGHGESTFSSSVSELLDKNNMSEEEVNLLMAGKVPDDCDLLFLYGPVKDITEEESTMLADYMSKGGKVFLILGDAKEDTPNLKKFLAEYGMEQTDGYIADMQRCYQGNYYYIFPEISASGDMAEGLDTDMVLLSNAHGMNLTAPARDTISVTPFMSTSANAYAVTQGEQKEGTYTLGAVATESLSSDEGSDTGKEESAEDKSASGSGGEEKQARLTVISAESLIDAQITDAFTTLENLNLFMNAVSANFDDVQNVAIEPKSLKVTYNTMQHAGLISLLLIFGVPFIILVYGLVKWWKRRKA

SEQ ID NO: 234 - protein, 373 aa, Bifidobacterium longum
LKPTDGLVRGASVSDTGVPISVPVGDVTKGHVFDVSGNILNKKPDETITVSERWPIHRNPPAFDQLESKTQMFETGIKVIDLLTPYVQGGKIGLFGGAGVGKTVLIQEMIQRVAQNHGGVSVFAGVGERTREGNDLIGEMAEAGVLEKTALVFGQMDEQPGTRLRVPLTALTMAEYFRDVQNQDVLLFIDNIFRFTQAGSEVSTLLGRMPSAVGYQPNLADEMGSLQERITSTRGHSITSLQAIYVPADDYTDPAPATTFAHLDATTELSRDIASKGIYPAVDPLSSTSRILDPRYVGQAHYDCANRVKAILQRNKELQDIIALIGIDELSEEDKTTVNRARKIEQFLGQNFYVAEKFTGRPGSYVPADETIE

SEQ ID NO: 235 - protein, 959 aa, Collinsella aerofaciens
MSDSSIVIRGAREHNLRDIDVSIPRDQLVVITGLSGSGKSSLAFDTIYAEGQRRYVESLSSYARQFLGQMDKPDLDSIDGLSPAVSIDQKTTSKNPRSTVGTVTEIYDYLRLLFARVGTPHCPECGRVIERQTTDQVADKVLAAGEGRRAFVLAPVVRGRKGEYTKLFEDLRAEGFSRVRVDGEVRSLDDPIDLDKKFKHDIEVVVDRIVIRENSLGRIAESVEQATALAHGNVNVYMLPDRDAPEGTEGELLEYSLALACPEHGHSIDDLQSRDFSFNAPYGACPECDGLGFKKTVDAEALIEDPSKSIADGVFGSLFGNSNYYPQIFAAVCKHFKVSTDTPWEDLPPRVRRAFLDGLGDTKISVDYQKLDGRRSQWDTKFSGVRNILYERYTETTNENTKARLEKYIREEPCSSCHGARLRPEMLAVTVGGKSIYEVCCLSCRESLEFFEGLELTERQQFIGGRIVKEILERLRFLVDVGLDYLTLDRASATLSGGEAQRIRLATQIGAGLMGVLYILDEPSIGLHQRDNERLIKTLERLRDIGNTVIVVEHDEDTIRAADYVIDMGPGAGVNGGHVVAAGTPADIMACPESMTGAYLTGKRMIRVPDERRKPGRGCLKITGARANNLKNVTAKIEFGTLTVVTGVSGSGKSSLVTDTIAPALTNAIHRSTRPVGPYKKIEGIECIDKVIDIDQSPIGRTPRSNPATYIGLWDDLRALFASTPESKARGYSPGRFSFNVSGGRCEACKGDGQIKIEMHFLPDIYVPCEVCGGKRYNRETLEVTYRGKTISDVLDMSVTEALAFFGNIPQIKRKLQTLYDVGLGYVSLGQPATTLSGGEAQRVKLAKELHRRQTGKTFYILDEPTTGLHFEDVRQLLDVLQRLVDAGNTVLVIEHNLDVIKVADRLIDMGPEGGNGGGTVVVSGTPEQVADCPQSYTGKFLAPLLRRDRERQAQLDAQ

SEQ ID NO: 236 - protein, 250 aa, Clostridium leptum
MKTLLELKELSKIYPSGEEQVYALNQISLSIRQGEFVAIVGQSGSGKSTLMNILGCLDIPTSGSYYLDGKNVASLNEDQLALIRNEEIGFIFQGFNLIPGLTAFENVELPLVYRRIEKPRRRKLALEALQKVGLAHRIKHLPSQMSGGQQQRVAIARAIAASPPLILADEPTGNLDSASGAQILAILKQLNQEGRTVILITHDDSIARSAQRIIRIQDGKIAKNCALAFIDNSPDYAIMDAGFEKAKTLP

SEQ ID NO: 237 - protein, 415 aa, Eubacterium rectale
MERGVYMSLYQDRQIKGFLLFLTLFALLFVGTATVLTIYQVNDAEVLWLKHDEAVSSSLLEQGVPKEVVAVAFTNTDISDDGRSLLAAAGLGKQSESSMRPYFNQFQRSAFCAMLCTVLFFLFVLAIGIFIFFWKRKRLYQQVDRILLNYINGDYSCHLPQNYEGAIYQVFSSIEQLATMLQSKNETERKAKEFLKDTISDISHQLKTPLAALTMYQEIIESEPENAETVKQFAAKMGISLKRMEQLILSMLKITRLDTGNIIFEKKSCRVSELIAHSVNDLTTRAKSESKQIQIDGDGEQQLICDMEWTGEAIGNIVKNALDHTQAGGIVRITWERTPAMFRIFISDNGNGIVPEDIYHIFKRFYRSKHSLDTQGIGLGLPLAKSIIEGQNGVISVQSEVGKGTLFTLSFLTDL

SEQ ID NO: 238 - protein, 595 aa, Bifidobacterium adolescentis
MAQRNTFRDDEDLEEKINMRDLARVGVYLKPYMARVVWILIVVAAMGCINVVEPYLTKIMIDSVIPAKNLALLGELVALLAVLIVIYEFGLRYRTVEITRVGQLMLKDMRRDLFTHIQTLPFSYFDSRPHGKILIRVVNYVNTLSDTLSSGLVNVISDVFTFFITLVVMFVVDWRLALYSLALFPLLIAWVLGLQHFQRRAYQVLSNKQSNLNAFIHESIAGVKTTQTFAREDTQFRTFQEQQGAVRSAWMRTVHIQTLMWPGIQTISVMTIAFIYYVGVTGFGGVDVTTGVLIAFVGYANNFWNPVISIGNFYNQLITCSAYLERIFETLDVQPEIRNAPDAVDLPQIEGRVDFNDVVFRYEPDGRNILNLVDLHVEPGKTIALVGPTGAGKTTIINLLSRFYDVAEGSVTIDGHDVRSVTLESLRRQMGVMLQDTFIFSGNVRENIRYGKLDATDEEIVAAAKAVHAHEFIMELPDGYDTVVEERGSTLSAGQRQLIAFARVLLADPRILILDEATSNIDTRTEEALQAGLNHLLKGRTSFIIAHRLSTIENADEICFIDHGQIVEQGNHAELLARHGAYYRLYESQYAMIKV

SEQ ID NO: 239 - protein, 817 aa, Ruminococcus obeum
MFPIKYIDNNLVWNKDNEVFAYYELIPYNYSFLSPEQKYLVHDSFRQLIAQSREGKIHALQIATESSIRSIQEQSKKLVTGKLREVAIQKIDDQTEALVSMIGDNQVDYRFFLGFKLMVTEDEVNLKNIKKSVFLTFREFLNEVRHTLMNDFVSMSNDEINRYVKMEKLLENKISRRFKIRRLEAKDFAYLMEHLYGRDGIAYEDYVYPLPKRKLKRETLIKYYDLIRPTRCVVEESQRYLRLEHEDSESYVSYFTVNAIVGELDFPSSEIFYFQQQQFTFPVDTSMNVEIVGNKKALTTVRNKKKELKDLDNHAYQAGNETSSNVVEALDSVDELETDLDQSKESMYKLSYVIRVSAPDLDELKRRCDEVKDFYDDLNVKLVRPAGDMMGLHGEFLPASKRYINDYIQYVKSDFLAGLGFGATQMLGENTGIYIGYSVDTGRNVYLQPSLASQGVKGTVTNALASAFVGSLGGGKSFCNNLLVYYSVLFGGQAVILDPKSERGNWKETLPEIAEEINIVNITSDSSNQGLLDPYVIMKDVKDAESLAIDILTFLTGISSRDGEKFPVLRKAVRTVSQNTNHGLLQVIEELRKEDTAVSRNIADHIESFTDYDFAQLLFSDGSVENAISLDNQLNIIQVADLVLPDKDTTFEEYTTIELLSVSILIVISTFALDFIHSDRSIFKIVDLDEAWAFLNVAQGETLSNKLVRAGRAMNAGVYFVTQSSGDVSKESLKNNIGLKFAFRSTDTNEIKQTLEFFGLDSEDENNQKRLRDLENGQCLMQDLYGRVGVVQIHPVFVELLHAFDTRPPIKSEVDLE

SEQ ID NO: 240 - protein, 424 aa, Dorea longicatena
MNIHLITYLTSKLFWIYTVFRYNTILYPKDEDTQKLFAYFCAYLLSCWGSMQWGTMYGDLLFELIALLIITVAYQADWQHHVWNTLMVYIMGILCDGIPIVFFQRYAVARNPVHHHMGPGTIVMGNFIFFLLEVIIERKVDVKRSYYIKNSHWLAMLSVPVISIIVCIRILLPDRRGVRSTIVLFLLFINVFIFYLHDEVQKSYVETAKQEEMKLQMSQYAKELEMMMKSQDRLNKIHHDYKHHLITIGAMAKTGGNEEILSYLKQMENIARTALCHHLYTENRNMNNLLNYILEDVKSVIEKPEISVEIPNHIGKELFDLSIVVGNLMDNAIRGAAASDERRLSFQMYYGKGIMNIQIENSIKDTPKVQNGIYLTTKSRKEGHGIGLQNVKLVVEKYHGQMEICHTEKSFQVKILLYMKLDEK

SEQ ID NO: 241 - protein, 251 aa, Clostridium bolteae
MYKAEEFKRILSYVEKWKGQVGVEVFPMFHRQAFASLLEESMDMLKHVPISFHGPYYKAEHSAPQGTQEYEYTMELVGQTLRYSERLNSRYMVFHHNNCAVRDEERMLRDSCANYRRVEELFRPLGIPVAVENAGVMDRNNMLLDESGFVSLCRAEGYPVLIDIGHAHANGWDLRSVMERLKGQILAYHLHNNDGVHDSHRRIGDGTLDFDSFMAWAGEYTPQADLVVEYGMETADDCLGIEADVERLLKI

SEQ ID NO: 242 - protein, 218 aa, Ruminococcus torques
MGYNVAVDGPAGAGKSTIAKLVAKEKGYIYVDTGAMYRGLAIHFLKKGISPEDKEAVAKACIDADVSIVYENGVQQVYLNGENITGMLRTEEVGNMASKTSAIPAVREKLLELQKTLAREKDVIMDGRDIGTNILPNADVKIYLTASVETRAKRRYDELASKGESCDFDEIARDIKERDERDMTREIAPLKKAEDAILVDSSDMTIDEVVSKICSFCN

SEQ ID NO: 243 - protein, 95 aa, Ruminococcus obeum
MQTYTIVLPALLGYIVWLLKNQKKDRDANSKGTMLLLRTQLIEYHAKYMQLGDIPSYAYQNFCEMYDAYHALGGNGMVTKMKQEIEELHIKRKGE

SEQ ID NO: 244 - protein, 388 aa, Clostridium scindens
MNNYTRICARVDLDAIEYNMEMMKKNIKEGVQMISVIKTDGYGHGALQIARMLEGKEYLWGYAVATPDEAVVLRKGGIKKPILVLGCIFPDQRKAMIENEIRMTVYTEEMAKEVSELAGSMGKQAYIHIKLDTGMSRLGFLIEDESVDKIESISRMPNLIMEGMYTHFAKADETDKTFTHSQMDGYLWMKKALDERRVTFKFYHCSNSAGIIDVKEANLDLVRAGISTYGLYPSSEVKKENVPLKPAMELISHVAHVKWVKEGTPVSYGGTFITKRPTKIATIPVGYGDGYPRSLSNKGYVLIHGKKAPILGRVCMDQFMVDATEIDDVKYADKVTLVGCDGNEKLPVETLSDLSGRFNYEFVCDLGKRIPREFIRHGEVVEQMDWFA

SEQ ID NO: 245 - protein, 569 aa, Clostridium scindens
MSEHDVLKKNRNFYVGVVGTVLEGLLSGSLFMLLYSVMQFLWSGQFDMNRVLVLTSIIALVFLFRILIYSYGYTKAQIGGAEVSKNIRLFMGDHLKCIPLSQFTQGQTGDYINTITSDVNNYEKILTHKIGDLAKSFSLSLMLIVFVMTIYVPAGIILLIADLLLIPGLWLSFRMVRKYGKEKNDICAENVSSIVEYVSGIQTFRAYGIGGMKNKTVINAMQEFCRISFVYEAKVLPIGAGFGILSWLSCPLVIWTAYAPWADGTLNTVDFLLICMLPLFCAKLANSIFVDLTSYKNLMISKNKILGVMNEPEETGSMEPLQTVTHEITFDNVNFSYVPGEPVLKHATFSVPDQKLTAIVGDSGSGKSTILNLIAKYYEANGGTISIGGKPINHVAAERVLEQISMVDQDVFLFDDTIRDNIRHARPNATDEEIEAVCREANCDGFIRKLERGYDTPTGENGNLLSGGERQRISIARAILKNSPILLLDEATASLDIENELAVKQAIANLLKKKKTVVMIAHTLSIVKNADQILVVSEGKIAEAGTHDELLAKGGKYTAMWNAEQKLSV

SEQ ID NO: 246 - protein, 91 aa, Dorea longicatena
MQITDVRVRKVAKEGKLKAVVSITMDEEFVVHDIKVIEGEKGLFIAMPSKKALDGEYRDIAHPINSGTRERIQNIILEKYEEALTEDVAEA

SEQ ID NO: 247 - protein, 470 aa, Bifidobacterium adolescentis
MRICLVLEGCYPYVHGGVSTWMHSYITAMKEHEFVLWVIGAKAKDRGKFVYDLPSNVVEVHEVFLDDALRLSGEHAKVIFTDEEVKALRELVNLSDPDWDVLFNLFHNKGVHPLSFLQSNEFIDLFTKICMEEYPYVAYADAFHTVRSMLLPVLYLMTGEVPKAQIYHAISTGYGGLLACLGGSINHAPVLLTEHGIYTREREEEILSAEWVAPAFRQRWIRFFAMLSQEIYRRAWRVTSLFGRARQTQIDMGAPASKCLVIPNGIQYERFCDIPLKPEDGWVDIGAVVRLAPIKDVKTLIHAFSELSNRVDNVRLHILGGVDDQDYADECYELVKQLEVKNLEFTGRVNVVEYMRKLDFTVLTSISEGQPLSVLESFAAARPCVTTDVGCCRELLEGEEGDDLGVAGFYVPPMYREGLARAMERMCASRKLREAMGQVGRERVKTYYRHERMLDEYRALYLDTADHYGL

SEQ ID NO: 248 - protein, 123 aa, Ruminococcus obeum
MRYEDSMKGVADQIIKEQQRVSKIINNPEEFHWHDEYATLNFFRFICKNIGNLRNGEIEKMATRLKNIDQKAVENHVNGAVWAFDYDKMFCVLMENEICRKVCEKNKYNSWMNLIGQYCFSRT

SEQ ID NO: 249 - protein, 378 aa, Eubacterium ventriosum
MFKVLAKDGNAKRGEFTTVHGKIQTPVFMNVGTAAAIKGAVAAEDLKTIKTQVELSNTYHLHVRPGDKIVKKLGGLHKFMNWDRPILTDSGGFQVFSLAGLRKIKEEGVYFNSHVDGRKIFMGPEESMQIQSNLASTIAMAFDECPSSVASRQYIENSVARTTRWLERCKKEMNRLNGLEDTINKNQLLFGINQGGIYADIRIEQAKAIADMDLDGYAIGGLAVGESHEEMYRIIESVEPHLPKDKPIYLMGVGTPANILEAVERGVDFFDCVYPSRNGRHGHVYTNAGKLNLFNAKYETDSRPIEEGCECPVCKYHSRAYIRHLLKAKEMLGMRLCVLHNLYFYNTMMEEIRDAIEAGNYAEYKAKKLEGFKENDKK

SEQ ID NO: 250 - protein, 196 aa, Ruminococcus obeum
MRRLSEKLTKYVIKTGAVPSESYDIYQYGFQIGLEMLCCFVTCLSIAIYMHMIPEFAIFTGIFMLLRTYAGGVHLNSFGSCFICSVTVQTIAMYFNSKYKFTVGTAWLLILVSAILILKAAPVECVNRELDDTEKEHCKKVTMKVLIAVIVFAGCCTLAGILAILSLVALTSFIILISQYVGILKYKIEKSKNKRR

SEQ ID NO: 251 - protein, 793 aa, Ruminococcus obeum
MIKAENQKKRKPFTAQDTIPYKEIYKDGISRTDDNYYSKMVQFYDINYQLAQNDDKAAIFENYCEFLNSFDSSVEVQITFLNQQVNFDEYAKNIDIPEQDDCFNDIRKEYSDMLKMQLSKGNNGLVKTKYITFSIKADNLRNAKSRLERIEASVLNNFKVMGAMAEPLNGVERLKILHDVMNMDTKESFHFHYGMVAKTGLQTKDFIAPTGFDFRNDSYFRMGQTFGCVSYLQITSPELTDKLLADLLDLEENLIINMHLRPIDPKAAIKSLKSTLSNIQKMKIEEQKKAVRSGYDMDIIPTDISTYGEDVEGLLNEIQSRNEKLFELTFLLMNTADNKRKLDNIVYQTAGIAQKYNCNIRRLQYQQEQGLVASLPLGMNQTGIQRIMTTTSTAIFVPFTTQELFQGGEALYYGLNALSNNLIMVDRKRLKTPNGLILGTPGSGKSFATKREILNVFLITDDDIIICDPEGEYFPLVNALNGEVIKISAKSNDYINPMEVNLDVIYHPEKYRINGDVEDIDTIIADKAEFITSFCEVIMKKPQNAELNGDEVSMIDLCVKDIYKKYLYNDPKPENMPTLQDFYERLNFYAPDKPAAQNIANSLQLYVTGSQNVFNHRSNVDTQNRVVCFDIRELGTTLRKAGMLIVQHMVWTRVSQNRSRRKSTRYYVDEFHLLLNQPQTANYSIEMWKRFRKWGGIITGISQNVTDFLGSLAVESIVGNSDFILMLNQHSGDQKILAEKLNISKHQISFVNNSNAGEGLLFYGNVIIPFADRYPQDTRTYALMSTKPDEIQT

SEQ ID NO: 252 - protein, 81 aa, Dorea longicatena
MAVKMRLRRMGQKKAPFYRIIVADSRSPRDGRFIDEIGTYDPNCDPSVIKVDEEAAKKWLANGAQPTEAVAKILKAAGIEK

SEQ ID NO: 253 - protein, 746 aa, Dorea longicatena
MQDSQIIRTEYSDVMKKSYIDYAMSVIIARALPDVRDGLKPVQRRTLYDMHELGIRYDKPYRKCARIVGDTMGKYHPHGDSSIYDALVVMAQEFKKGMILVDGHGNFGSIEGDGAAAMRYTEARLAKITQEAYLADLDKDIVDFIPNFDETEKEPVVLPVRIPNLLVNGAEGIAVGMATSIPTHNLGEVVDGVKAYMKNEEITTRQLMKYIKGPDFPTGGIVVNKDDLPEIYETGTGKIKIRGKVEVEDMKGGKKRLVITEIPYTMIGAGIGKFLNDVCNLVETKKTTDIVDISNQSSKEGIRIVIDLKKGADVENLTNMLYKKTRLEDTFGVNMLAVADGRPETMGLKRIIEAHVDFQFDMATRKYKTLLKKEQDKKEIQEGLIKACDVIDLIIEILRGSQNVKDAKACLMNGETENIKFKSSISKKMAGMLRFTERQATAILEMRLYKLIGLEIEALQKEHEETLAKIEKYEDILNNYDSMAAVIMEDLDRIKKEFARKRRTVVENAEEAVFEEKKVEEQEVVFLMDRFGYAKTVDVSTYERNKEAADNENKYILHCMNTGKICIFTKDGKMHQVKVMDIPYGKFRDKGQPIDNISNYDSTQEEIVYICDSEQMRYAKLLFATKQGMIKKVEGTEFQVTKRTITATKLQPEDEVVKIQVVTENQHIVLQTTDGFFLRFPAAEVTEKKKGAIGVRGIRLKKDDALTDVYLFEEGTECKISYHEKEVTLNRLKLAKRDGTGTKYRG

SEQ ID NO: 254 - protein, 343 aa, Collinsella aerofaciens
MLMGEGAMAREGARSKDSAKPGIKEVAAVAGVSPTTVSRVLNNRGYISQETRDKVHAAMKRINYTPNDIARAMLNGRLNLIGMIVPYVSSPFHAQAVQAVERTLAENGFKMLLCNSANRPDLERSYIDMLRRNMVDGVIVNSLNIGAEAYAEMGLSLVGIDCDLGETSVQIASDSYGIGELATRRLIDDGCSRILCLRNNSRMRMPANKRTDAYHDVVEQAGLPALVREVEFVKSDDEKSAVVAKILDENPDIDGIFAGDDTMAAICLNVMKRRGLSAPDDIKVVGADGARRTMTFMPDLTTVRQDIDRIGELAAQSIIALVNGEKPESNTKLPVELIEGKTA

SEQ ID NO: 255 - protein, 152 aa, Clostridium leptum
MSVKIIIEPLAERHLAQAAQLERECFSDPWSLEGLRAELTNPNARFLAAVSGEAMAGYLGLHAVCGEGYIANLAVAPAFRRQGVARALLRAGAEIAEKEKLEFLSLEVRTSNLPARRLYESEGYVHIGARPGFYTNPREDGEIYTKRFGGSL

SEQ ID NO: 256 - protein, 363 aa, Eubacterium rectale
MKKQIGKPLMQKWKNKIGVRLSALDKKKLVLTNLPYALAAFYADRAFFLYRNSPGEDMGNKLLYAMEHADRIFAGFVLSNNWKDLLAGITVAVVLKVLVWQKQSDAKKLRKGIEYGSARWGNAEDIKPYMSENPWMNIPLTATEALTMESRPKQPKYARNKNIVVIGGSGSGKTRFFVKPSVMQMNCSMVITDPKGTLIEECGKMLAKGPPKRDKDGNVIKDKSGKVVYEPYVIKVLNTINFSKSLHYNPFAYIRSEKDILKLVTTIIANTKGEGEKSSEDFWVKAEKLLYTALIAFIWYEGDEEEKNLNTLLDLLNESETREEDETYQNPVDMMFQELEERDPQHFAVRQYKKYKMAAGVIR

SEQ ID NO: 257 - protein, 583 aa, Bifidobacterium adolescentis
MLRIVRYLSKAEIGQMLVALVSIVGQIWLDLTLPDYMADITQLVETPGSEMHDIWVAGGKMLLVSLGSAACAVVTGFIAARVGASFSQRLRSLEFNKVESFGPAEMNRFSTASLITRSTNDITQIQMFITMGLMMIVKAPIMAVWAVCKIAGKGFDWTLATGIAVAILLVVIAVLMRFVMPKFKAMQRLTDNINLVARENLTGLRVVRAYNAEDYQEAKFTEANKELTETQLFTNRAMAIMMPLMNTIMNGLMLAVYWIGAYLIDAADAVDKLTTFSNMVVFSSYSIQVIMSFLLLSMVFVLWPRADVSAQRVLEVIDTEPMVTDGTQDAGKPGEEGEIEFRNVSFAYPDSRHAMLEGVNFKAKKGQTVAFIGSTGSGKSSLINLVPRFYDATQGEVLVDGVNVRDYKLKALRDKIGYVPQQSFLFKGTIASNVAYGDTDRDDDTVRRACDVAQATEFIDKKQKKYDSGISQGGSNVSGGQKQRLSIARAVYRHPEILIFDDSFSALDFKTDRAVRDALEKEAKDSTKLIVAQRIGTIMNADRIIVLDDGKVVGQGTHEELLDTCEVYRQIAESQLSEDELKR

SEQ ID NO: 258 - protein, 843 aa, Anaerostipes caccae
MKPLFLEISAWGPYAGKNQIDFSKFQGGLFLITGPTGSGKTTIFDALTYALYGEVSGSVRTKESLRSDFASQKEDTYVILEFTHRNEKYRVERHPKYRRAKRKGSGTTVKKEDAVLTLPDGTVKAGTSKVNEELSRILSIDYDQFRQISMLAQGEFQRLLTAKSSDRAEVFRSIFHTQIYKKIQGLAGEKARALLSEIREITNQMEEAAKLSGEDPAYEEMREKKDFSAVITFLEDDYKEKKQLASEAFLNSRNKREEFDSKKQIFEQAKKLSAETETLASKICSLEEELGELKQKRENIRKKKQDLYSLRDVMDHKKERLGVLKEINEQLERLGQLETEYEEASQEESRQIRRTRMAVYQEWLEAEGEAKASSEKFKCFSEEFEQAECEYRRADDLRKEEQDIYMEMQSAYYACSIGILAKDLREGKPCPVCGSTIHPKPAGIPSEAPDREQLEAQKDRAEKAEELFRKWYEKMLKLKEQKNTAQTEWKRKQEELGEEPEYEGITREEACSAEKFSRQKEENCLADIREQRMKAEGRMRAFREQLESWGRAEELKEEHLALSKELEEYDSENDRLTAENIELETALSKTRTLLEERRGEFEERKKQRAELEQEKVSSGDLENLEGEIKKTEEEREQLAVLVHQRQRALCSLKEKQKKKEKLEESYGIVGDVDRLLSGNNALRLTFEQFILITYFRDILKAANIRFVKMTGGRYEMFRSETVTDARKKDNLEIEVMDYYTGKRRSVKTLSGGESFKAALCLALGLSDIVRNSAGGIQIEVLFVDEGFGSLDSESLEQAVSCLQELSGKNRMIGIISHVPELSERIEEKITVRKKNMGSSIEKL

SEQ ID NO: 259 - protein, 260 aa, Ruminococcus obeum
MKVKELTNWLDGRYPADMAEHWDNVGLLVGDDEAEVHHVLLALDLTEKTLDEAISAGADMIITHHPMIFEGQKKINNHSFTGRRILKLIRNRIQYYAMHTNYDVLGMAELSADYLKLTDREVLSVTAHTEQGEEGFGRVGCLPYKMTLKECGEFVKEALALNDVRIYGDPDTMVEKAAICTGSGKSMISDVLAKGADVYVTGDIDHHTGIDAVASGLPIIDAGHYGTEYIFMKAMRKILEEKYPSLQITCAKVKSPYMIL

SEQ ID NO: 260 - protein, 718 aa, Eubacterium ventriosum
MKDKIFGVLQRVGRSFMLPIAILPVAGLLLGLGSSFTNETMLKAYGLLGIMGPGTVFNAIFQVMSDAGNIVFTNLPIIFAMGVAIGMAKKEKEVAALAAAIAFFIMHASIGAMITINGGAEKMLEGATTDVVGITSLQMGVFGGIIVGLGVAALHNKFYKIELPQVLSFFGGTRFVPIICSLVFTLVGILMFFIWPVIQSGIYSVGDLVLNSGYAGTWVYGFMERLLIPFGLHHVFYLPFWQTGVGGTMEVGGQLIEGAQNIFFAQLADPSVTKFAVSATRFMSGKFPLMIFGLPGAALAMYRTANPEKKKAVAGLLLSAALTSMITGITEPLEFTFLFVAPLLYGIHCVFAGLAYMLMHVFKVGVGMTFSGGLIDMFLFGIMQGNGKTNWIWIVIVGIVYFIVYYFLFSFLIKKLDLKTPGRDDSEEVKLYRRSDVEAKKNGKSENGENSDVDELSEMITNGLGGKKNISDVDCCATRLRCTVFKAELVNDGMLKATGASGVVHKGNGVQVIYGPKVTVIKSNLEDYLETAPNIEYNGSNSQSDEVENKTEDGNNQKEQETKIVKSIIISSPITGIAADLGTAPDEAFASRMMGDGAVVTPTDSVVKAPADGEIVFVFDTKHAVGFTTEDGISMIIHVGIDTVKLNGEGFDVMVEAGQKVKKGDPIMKLDLDYLSANAPSLASPVMCTELSDNQKIRLLKEGDIQAGESLFAIDIYE

SEQ ID NO: 261 - protein, 238 aa, Eubacterium rectale
MNNQFIQRVIFDWNRIDNDSYLKGIEAFKGIEKLDFNKPITFFVGENGSGKSTLLEALAVAHGFNPEGGTKNYVFSTHDTHSELCDAIRIAKGYRKEKWGYFLRAESFYNVATQEEEYADITHPSAKYHEKSHGESFLALAQNNMNPNGLYLFDEPEAALSPQRQLTLLMQIYRCAKEGAQFIIVTHSPILLGIPDADIYCFDNGCIHLCEYEDTESYQVTEMFINNRQMLLDRLLTD

SEQ ID NO: 262 - protein, 224 aa, Ruminococcus obeum
MFNFMVTNEGGLTTAGYAIAIIAGIILFLAAICFAGKHSEKHKLTTRQLVFCAVAMALAFITSYLKIITLPWGGSVTLCSMLFIVLAANWYGVGTGITVGLAYGILQFIQEPYVLSFFQVCCDYILAFAALGVAGFFAKQSHGLLKGYIVAVIARGAFHALGGYLYWMSYMPDNFPKSLTAIYPIVYNYSYLLAEGIITVIVISIPAVSKALVQVKKAALGTSL

SEQ ID NO: 263 - protein, 565 aa, Anaerostipes caccae
MSYLKGMIEEMQETEGKKHRKKKVIVCILAVLVLLTAGFLGYRVYANYKEEQFFKSVKLREIKVKPMTLKHKEKDVFTEAYQKESQDQIDKQKKKNYTIQKPMVIQNAYGTNTTALYYYGKTDRASYAVCTVEAPNAGAAVYKHKLKSKKKYSTTHEYQIIGLSAGTRNKVTMEFFNEENRAVEKQYFYVDIPEDDVIPRILKKSKGSSEQKMEDGLFALLGHDKAQNANIYLYDNNGVNRGRMPLNDYRTDRLLFIGDDMAYSYDFNKIAMVNRLGKVTKTYDLGENYEFHHDFLYAEKQNKFICLVNDKKQDTIEDIVISVDVKTGEVKELIDFEDYFKTMRLLAYRPKKNTYGGTGLDWLHLNSMNMIDDDSMIFSSREQSTLIKMKNVFEKPEVDYLIHGGTVYNGTDYQKYLLKKEGNFVGQAGQHTISVEHDKSLPKGQYYLYMFNNNYGYSATIKNFDWSMFPGTGTMKEGEKSMYYKYLVDENKRTYKLVQSFSIPYSPIVSSVEHLKNNISFGSGTSKTFGEYDKDGKLIYSFYYDADKYSYRVMKYDFEGYLFRE

SEQ ID NO: 264 - protein, 172 aa, Eubacterium eligens
LRTYENKDELKKEINKSFAKYIFEFNDIPESLKDKRVDEVDRTPAENLAYQVGWTTLVLKWEADERKGLHVKTPSDDFKWNQLGELYQWFTDTYAYLSLQELKDMLNDNINSIYAMIDSLSEEELFKPHMRKWAGEATKTAVWEVYKFIHVNTVAPFGTFRTKIRKWKKIAL

SEQ ID NO: 265 - protein, 202 aa, Clostridium scindens
MHRNRIKMICFTIGLMMAVLLAGCSGKQDARTVELSEAKEGSVAEEKEEETEDSAIEENEDIYVHVCGEVNQPGVYCLPAGSRLYEAIEAAGGLKEGAAAESLNQAQEAKDGQQIYVPSIEESLKEGVSGEGEPAEASDGKINLNTAAKEQLMTLTGIGETKAAAIIRYREENGGFQSIEELMEVEGIKEGVFNKIKDQIKI

SEQ ID NO: 266 - protein, 464 aa, Eubacterium rectale
MAENIENNGCSQRDNAEHEGYVKASRSFNRIWKERDSAQPRLLETILYKDNFNRAYKRVKANKGAPGIDGMTIEEALPYLKEHQQEITDRIYRGKYTPSPVRRVEIPKPDGGVRKLGIPTVIDRTLQQAITQQLVPIYEPLFADGSYGYRPNRSAKDAILKVKEYAEQGYTFAVVLDLSKYFDTLNHEILINLLRKNVKDERVVQLIKRYLKSGVMENGVVIDTEEGSPQGGNLSPLLANIYLNEFDQEYLKRGVPCIRYADDIVLLAKSKRASERLLESSTKYLEERLKLTVNREKSRTVSVFAIRNFKFLGFALGRNGKGIYVRVHPKSWKKFKSRLKELSSRKRCQSIKPSLEKIKVYARGWLNYYGIASMKNNIDDINGWLYHRIRMCIWKQWKKPRTKYKNLVKLGIPEHYAATIANSRRKYWYISNNKAVIWALNKERLINSGFYDLATAYQSVHVNY

SEQ ID NO: 267 - protein, 244 aa, Clostridium bolteae
MKENKYDNDIFFEKYSQMERSKKGLSGAGEWETLKALLPDFQGQRLLDLGCGYGWHCIYAMEHGAVSAVGVDISGKMLEVAREKTEDSRVRYVECAMEDIDFPDESFDVVLSSLAFHYVESFSQVVDKVRDSLAPGGYFVFSVEHPVFTAYGSQDWYYDENGNILHFPVDNYYYEGKRKAVFLGEEVVKYHRTLTTYLNTLLTHGFELSQVVEPQPPDSMLHIPGMLDEMRRPMMLIVSARKRS

SEQ ID NO: 268 - protein, 703 aa, Ruminococcus obeum
MYLVIAEKPSVSRAIAEVIGAQEREDGYLQGTDCMVSWCFGHLAEYVSPDAYDEKFNQWRYEDLPIIPKDWKVTVSEDKKDQFYILKRLLNSPEIEYVVNACDAGREGELIFKHVYDLSGSKKPVKRLWISSLEDSAILDGMQHLRSAEEYRHLAEAAVCRSQADWLVGMNATRAYTTKYFKKLTVGRVQTPTLAMLVERAGQISNFQKEKYFNVELDCDGIPAVKPKIFDPDEAEQLRSRCQGSEAIVTAVKETEKKVKAPKLYDLTTLQREANRIYGMTAKQTLDTAQSLYEKKLITYPRTDSQYLTEDMEQTARNVVRQIYEKYQLTGPFDQPEQPDVKKVMNNSKVTDHHAIIPTMELASCHLDELKSWEEKILFLIAVHTVMAMSKDHIYQETEIEVECQEEIFKAKGKIVLQDGWKLFENCFKNKDRMAIVDPDQEMKERMPKVTQGQTFYAVDAEKTEHFTSPPKPYSEDTLLAAMETAGNKEFDEDTEKKGLGTPATRAGIIEKLVYSQYATRKGKQIIPTDDGKVLVEILPDFLKSASMTAEWENQLLLMEHGEIAPEQFMTGIKNMLTMMLNGCDAISEEETRRFQTRESIGTCPVCGSLVYESKTNFYCSNHDCHFALWKDNRYLQSMEKNMDKKMAAELLKSGCVHVKDLYSRKKNMYFEADLHMDADETGRVKFSLSFPKKKPKNKSKKK

SEQ ID NO: 269 - protein, 517 aa, Ruminococcus obeum
MMYAVVTYANMRGIRSVDCIVDLCERDHAFIWLTRGQKPKRDAFYDFKNRKLTSDVLDDLNYQFMRRLQKEGLVTLKELFIDGTKIEANANRYTFVWRGSINYHLAGLLDSIDQLFEKYNSFLQENDYGTKYELGNAQMFVIEGMDKVREVIEKNRKRKLVKHKKLSNNRIIEIDNCSPLEIRKLQNNLTMIADNEEIEFVYGKVKRKPALQQLHEELEQCEKRLMEYKECFEIMGKNRNSYSKTDLEATFMRMKEDHMLNGQLKPAYNVQIAVENYYIVHGYVSSDRTDYNTLIPVLEKHKTAFGSILEEVTADSGYCSEKNLLYLKRNEISSYIKLQDHEKRKTRAYSEDISKYYNMRTGIFEDEQFYICHDGRELRHLRTESKEQDGYTQTFEVYGCADCSGCEHKARCLYKYDAEKDAEKNKVMKINEQWEELKERSHANIQSERGILKRQTHSIQTEGHFGDIKENENFRRFNYRSADKVYKEFMLYAIGRNINKYHRFLYEKLRKFEGKTA

SEQ ID NO: 270 - protein, 1116 aa, Eubacterium rectale
METNFDYLLKKEEYADFAKQAVEAEKSLSISPATCAILSRRALELAVRFVFSYDAELSLPYRDNVSSLIHEPTFRRIIEPRLFPMLKYTIHLGNVAVHTNNNIGRDEAIIALRDLFEFCDWIDYSYSREYDEKTYDESILASGNEKRIKADELMKLYEGLSSKDKKLESVLKENEELREQMAKKRSQNVKTREFHVDTISEAETRKRYIDVALKEAGWVIGRNVTEEEPVTGMPNSTGTGYVDYVLWGKDNLPLAVVEAKKASVDAMVGSQQAKLYADCLQNKYNRRPLIFITNGFEFFYTNDYMGYPRREVSGFFTQEELQLEMDGRTSRIPLENIRISDDITNRPYQKEAVTAVCDAITNKHRKMLIVQATGSGKTRVSISIVDVLRRHNYVKNILFLADRKALVKQAKNNYTNLLPDLSCCNLLDNKDDPESCRMIFSTYPTMMNAIDERKNKYGEKLFSPGHFQLIICDEVHRSIYKKYQEIFEYFDAMLLGMTATPKNEIDKNTYGVFDLERGVPTFAYELEKAVEEGYLVNYSTLEYKSKIMESGIHYDELSDEEKEEYEDTFSDDDTVGDDISGEAVNTWLFNADTIDKVLRELMEKGLKIEGGDKLGKTIIFAKNSLHAQAIVKRFNKLFPEYGGDFIKRIDYSIKYSDSLIDEFSTSDKMPQIAVSVDMLDTGIDIPEILNLVFFKKVKSYAKFWQMIGRGTRLCPNLLGEGMDKERFLIFDFCNNFEYFRVNKNGAENGITESLNEKIYNTKAQIVRELQAPVYSGDEIYADYRKSLVDDLKEDVISLNDDSFMVKRHLRYVEFFRASSSWDNLETIEISDIREHIAPLIRPKKEDELARRFDYLVYSIDLGLLQSKSIQSPVNIVVQTAEKLSAKYSIPQVEKKKEIIEKVQTNEFWDKVTIIELDTVREALRGLLQYLDRQVRPIYYTNFTDSITDGTPGEPLYGGNDLKNYRKKVEFYLKEHSDKLSVYKLKNNKKLTETDLRELERILWTELGSKEDYIKEYGETPIGRLVRKIVGVDRAAVNEAFSCFMSEERLNINQMRFVNLIVDYIVANGNIEDNKVLMGEPFKSVGSITTLFKDDMSTAKQIMEIVNQIKRNSEEIA

SEQ ID NO: 271 - protein, 314 aa, Clostridium bolteae
MAQHAILRFEKHKGNPARPLEAHHERQKEQYASNPDIDTSRSKYNFHIVKPESRYYHFIQNRIEQAGCRTRKDSTRFVDTLITASPEFFKKKPPKEIQEFFHRAADFLIGRVGRENIVSAVVHMDEKTPHLHLVFVPLTEDNRLCAKEIIGNRANLSKWQDDFHAYMVEKYPDLERGESASKTGRKHIPTRLFKQAVNLSKQARAIEATLDGINPLNAGKKKEEALSMLKKWFPQMGNFSGQLKKYKVTINDLLAENEKLEARAKASEKGKMKDAMERAKLKSELDNLQRLVDRIPPDILAELKRQQRQHGKER

SEQ ID NO: 272 - protein, 483 aa, Bifidobacterium adolescentis
MKRQAIVAQGTVEGLAAEDQGITVFRGVPFAQPPVGGLRWRAPQPALPWDGVLQAFDFGPTAMQPTPGASDDFYDREWGTDPAVPMSEDCLYLNIWTPALRGYGADSMVTSEKLPVMVWIYGGAYQCGGTFEKEFDGTHLAANGVVVVSVAYRLNAFGFMTHPLLHEEAVERGDGEPYANFGFLDQRAGIQWVKENIAKFGGDPENITVFGQSAGAASVLAQICSPMNHGLFQKAIMQSGAGLGYFNARQDTLEHAQANGIRLFEALGVSTLEQARAIPARTVLEAAESLPVPPDSGREDDWSMIVNWVPCVDGLFLPDQEERIVEGCKANNVDMLVGNTTNEFIASTEDGKPVHVGQLGNLTLIRKWTASGGTAPYYYHFDVAMPGDDAGAFHSSDLWFSFGSLAKCWRPFVGWHYDLARRMGLYWTNFAANGDPNGTDRDGTPLPVWDPCIGEEYPAMHLCQEPGMRTDWLTETDRKAFGL

SEQ ID NO: 273 - protein, 549 aa, Collinsella aerofaciens
MGMPMQHIDRIIRSKNVFTAQDGIDAARELAIAIAGDRIVAVGAPDDVIAAAPAAAPVVDYGEQFICPGFHDAHLHFFHTSVGSSPYMLMDMGTSEAALVQHALEFSQDLPDDAWVVTQGWRDYRWDPPEHPTKASLDTAFPDRPCVMYSGDGHTLWLNSRALEALGVTRDSEPPAGGSYDKDANGELTGIAHEAAAMQLLPRCLEWLGEDRIASAYADQMRRMAEQGITSICDMSLMPMPGCDFIRDDVYDKLQAAGKLGIRAHLFPTLLDDQSRLEELQTRYANNALLSAPGFKQFFDGVSSEHTAYLTEPYTNPRFPGDQGRLTVPAERMRKLVLAAAERGHTVRIHVIGDGAIHAALDIFEEAAELYGLPQHGHNTLEHLENLLPEDIDRLRKLNVVASSQPCHITLDPGGPERDLGLERSRIMWPFATYKQRGIRQAFGTDSPITAVTSMNVLYTAITRQDPKSHWPEGGWLPSERIDAATALRNYTLGSAYAAGDEQNLGSLEPGKYADLVVLDQNPLTIDPQELQATKVQATYLAGNLIYER

SEQ ID NO: 274 - protein, 519 aa, Bacteroides capillosus
MNQTLFYNGTILTMEDGPAPQAVLVEDGVIRAVGALAELDRLAPDAVRRDLSGRTLMPAFLDPHSHLTALASTLDLCPLGSAASFADIARLLLEFQKKRNMPADQWLIGFGYDHNVLAERAQPDRHALDGTFPETPVLISNASGHMGVANSAALKLLNITADTPDPEGGRIGREADGRTPSGYLEENAFIRLASSMPGPSPDQAARNVERAEEIYLSHGITLIQDGLTDTGRYALLSAAHLKTEAVGYADLKNTPELIDRPHIGGYKIFLDGSPQGRTAWMLEPYASNTPDQPDYRGYPIYSDEEVTGFVRTALTQGKQLLAHCNGDAAAAQYIRCCRAAQEETGLKISDIRPVMIHAQLVRREQLEEMKELGIIPSFFAAHLWYWGDVHAENFGPDRAASISPLGWAEELGLPFTLHQDTPVIQPDMLETVWCAVNRVTREGKTLGGALKISPMAALRAVTLHAAYQYSREDILGSIKPGKQADLIVLSADPTAVDPMDIRSIRVLETIHGGKTVWQT

SEQ ID NO: 275 - protein, 168 aa, Clostridium leptum
MEQEKPNHRIKIVALRNRPGLCGPAAAWFSGKWGIPEAEYRRSMEGMLQKSAAVPQWYVTLGGQGEILAGAGVIENDFHNRKDLSPNLCALFVEAPCRCQGVAGMLLDFIRKDLGKLGIPVLYLVTGHTGFYEKYGWRFVTMAMGDDQQPLRLYQSPAFSPSPPSALR

SEQ ID NO: 276 - protein, 85 aa, Ruminococcus obeum
MKTFEYTIKDELGIHARPAGLLVKEAKKFESECTITKDGKTKKLTQLMMLMSLGVKQGDTVTVTAEGADEEAAAAALKEFFENNL

SEQ ID NO: 277 - protein, 716 aa, Eubacterium siraeum
MSTVITHKQFPNHKIFKTEIAGRPFSIEVGKTAELANAAALVRYGDTTVHVAICVSPRPRDGVDFFPLSVDFEEKLYAVGRIPGSFMRREGRPSLPAVLASRLIDRPIRPLFPYDFRNDVCITCTVMSVDYDCSPEVTAMIGVSACLSYSEIPFAGPIGCLEVGYCDGEIVFNPTQEQRKTSRMDVTVAATEKKVVMIEAGADQIPDDIMYEGIVKAHEEIKKQVAFINGIVSQIGKPKMEYDHADFNQELFDKIVDKYMDEAKAAMDTDDKNIREQRWNAMIDKWHEDYLEEYPEMDKYLEEFTYKFQKKIVKAWLLQGHRVDGRAKNEIRPLSAEVGVLPKVHGSGLFTRGQTQVLSVATLNTLAASQKLDTIWEEEEKRYMHHYNFPPYSVGEAKAPRSTNRREYGHGALAERALVPVLPSVDEFPYAIRVVSEVLSSNGSTSQGSICGSTLALMDAGVPIKAPVAGISCGLIQDDDGSFQTFIDIQGVEDFHGEMDFKVAGTKAGITAIQMDLKNDGLTHEIIKQALEITKDARYAILDEIMLPCIAEPRPEVSKYAPKMITMKIDVDKIREVIGKGGSVIQKICAESGATVDIDDDGTIHIASPNAEACDAAKKMIDTIVFVPEVGQLYYGKVVRILTFGAFVELAPGKDGMVHISKLADRRVEKVEDVVNIGDMIWVKVTDIDEKGRVNLSYKDALKEIKAKQAAGESAK

SEQ ID NO: 278 - protein, 716 aa, Bacteroides capillosus; identical to SEQ ID NO: 277

SEQ ID NO: 279 - protein, 1061 aa, Eubacterium siraeum
MARRIAKTGGEKMSLYEKVPASVNFVEREKQTEKFWHDNDIFRKSMEQRKGDKTYTFYDGPPTANGKPHIGHVLTRVIKDMIPRYRTMKGYDVPRKAGWDTHGLPVELEVEKMLGLDGKDQIEKYGLDPFITKCKESVWKYKGMWENFSRTVGFWADMDDPYVTYDNNFIESEWWALKQIWEKGLLYKGFKIVPYCPRCGTPLSSHEVAQGYKDVKERSAVVRFKVKDEDAYILAWTTTPWTLPSNVALCVNPDETYVKVKTADGYTYYLAEALCDKVLGGDKPTAPYEVVEKYIGKDLEGKEYEPLFDCAVEICEKQHKKGYYVVCDNYVTLTDGTGVVHIAPAFGEDDAKVGRKYDLPFVQLVDGKGNMTAETPYAGVFVKKADPMVLKDLDEKGLLFDAPKFEHSYPHCWRCDTPLLYYARESWFIKMTAVKDDLIRNNETINWIPESVGKNRFGDWLENVQDWGLSRNRYWGTPLNIWECECGHKHAIGSIEELKSMSDNCPDDIELHRPYIDAVTIKCPHCGKQMKRVPEVIDCWFDSGSMPFAQHHYPFENKEKFEQQFPADFISEAVDQTRGWFYSLLAISTLLFNKAPYKNVIVLGLVLDKDGQKMSKSKGNAVDPFESLAEHGADAIRWYFYTNSAPWLPNRFHAKAVNEGQRKYISTLWNTYAFYVLYANIDNFDATKYTLDVDKLSVMDKWLLSRLNTVVGEVDDNLANYRIPEAARALQDFVDEMSNWYVRRSRERFWSKELTQDKINAYMTLYTALVTIAKTSAPMTPFVCDDIYRNLVCSLDKNAPVSVHLCDFPTVDEKLIDRHLEEEMDTVLTVVTLGRAARNAANIKNRQPISKIMVKGDKTLEPMYADIVKDELNIKEISFIDNTDHFTSYTFKPQLKTLGARFGKQIGEVRTKLAEVDGQKAMNEIRETGAMTLTLSTGDVQIAKDDLLIDEHQKEGYAVVTDRGYTVVLDTTLTPELIEEGNVREIVSKIQTMRKDAGFEVMDHIVIYCDGSDKVAEILTRNKDSISEDTLADDIVTGKTDGFTKEQDINGENVTLGVKKV

SEQ ID NO: 280 - protein, 183 aa, Eubacterium rectale
MNFNLKLKKIRTFRKMTQKELSEKIGLTDQHRIVQYEKGVRVPKKDLVDKMAKALDVNPYTLYDTAGRDASEMMELLFWLDEFNPSALHLFLPRKFPGEKCNEVADTSVYYHDNDSWPAHAPVCMWFDYGVLNDFLKEWGVRMDELKSGVITRDEYFEWKINWPYTCDDCGKYEPKKQWRKNF

SEQ ID NO: 281 - protein, 416 aa, Bacteroides capillosus
MQKVINFLRGSVRLEAEGAFPERFLNLCAQNGVAFWAVEWLETGRVAITVPRRDAKRAQALGERASCQVQRQRTGGIPFFLARFRRRYALLTGLVLSLAAVCVLSQFVLNVEVSGNETVTTAEILTELRRLGVRPGVYGPGIDPAATAQELLLQLDDLSWCAINLKGTVAEVLVRERIEPPEVVDETELGDVVATVPGIVTQVEVLGGEPAVEEGDTVVEGQVLITGNIHMEGAEYSGIDLGWRQVRAQGRVYARTWRTLEAEIPLTAQVKAYTGEEKSLWSMSLLGWRVNFYGNSGISYERYDKISDVWTAHLPGGQEMPLSLTRETVRAYETATAQVDAAAAEKLLRAQLEEDLLAALGETGEAVSMDFAARDQSGMLIVRLQAECREEIGRFVPYEGEQENETQPAEEQGSSG

SEQ ID NO: 282 - protein, 714 aa, Parabacteroides merdae
MENTFRPSRFLSLRATTPSPCTWEEIMQELTGERHAAATALFRALAAGEGQDAETSKRQQSQIKQNQPAFVPSVHLEGGRSSKHIKGYPGSIMVDIDGIPEEIFDETLERVRADPHSFLAYKTLSGRGIRVIAWMEGEVTEENFPAAWQTVNAYYARLTGIAIDRQCKNATRMSVICHDPDALYRPDAERMKFASLPSAKAGQKQDIAAGKKHRGRKTSAARAENTVRRLVEEEGVHYAAGSHNNYISRCLYLMNRFGVPEAEAEAWAVELFADYDTASVRSTAKSCYALTAEHATMKLSDVSPRNGNGRQRKATVEEMERFIGGSMQLRMNQLTHQLEHRPVTNGIPAPDGWAPMTDTVENSLWCSMRRDGLEADLFHLRTLLLSDFAPRYHPLEEFLEKAGPWDGVTDHIGNLAAMVHPADSDTDRFDLCFRRWFVGMVAAALDPKVVNHVILVLIGRQGCFKTSFFQNLLPPVLRRYYASKTNSQRLTKDDLFTMTENLLVNFEEIDSMQRSELNQLKAMTTTLYVNERPAYGRNKVHLPHVASFCATGNNLQFLTDDTGNRRWLPFEVTAIDNPWTAHIDYEGLYAQAKHLLDNDFRYWYRDHEIEELNLANRRFETPNPARELILMYYRHPVDYEKGTYVTASQIVTRFGGSIRLNAVQVGIALKELGYTCTRTRHGNIWLVVERTTDEMKSILPEADDTDFPPSSGDR

SEQ ID NO: 283 - protein, 1192 aa, Bacteroides capillosus
MPDLYLKALEIQGFKSFPDKTVLTFGEDVTAIVGPNGSGKSNISDAIRWVMGEQSTRALRGGKMEDVIFGGTAKRKQLGFAEVSLVLDNSEHFFDLEESEVMVTRRYYRSGESEYYINRRSVRLKDVNELFMDTGLGREGYSIIGQGKIDEILSVKSGDRREIFEEAAGISRYRHRKEEAEHKLIRTDENLVRINDKLDELELQVEPLRAQSEKARKYLLLRDELRGLEISVWLDQLEKIRAAAIKTLNDYENAVRQKDEAQRQVEVLYAAAEGYAAQMREKDVEVEHIRFEMMQREADANLCDNAIAVLKANIQNNMENSGRLQEELAAQEGRDDSIGAQIEDRRSRIRSIIEEADALRASLADYQNQSQEAIRSAGTLAAEMEALRQKEAVESASASEAKALLSALAAAAQELMDRDETVRQELAAAEERLNTAQAEEKTARAELEQAREDRDALKNVISGYTLRLESRSRKAKETQDRHMKLQMEENAVKSRIHMLQDMEKAYEGYSKAIKVVMGEAERGQLRGIHGPVAGLLHVEDQYTVAIEIALGAAMQNIVVDTEEAGKAAIQCLKRRDGGRCTFLPLTSIRPSDFRDRAVEKEPGFVGMADRLVRFEPAYEKVFSNLLGRVVIAEDMDCAIAMARKYSYRFRIVTLDGQVLNPGGSMTGGSASRSAGILSRANELERLNTQLNGVRDALAEAAKVLDEARREAAVAQYEVETAQAQQRIHEDTILKMEERCGHYETQLAELRRQQEVQRAELKQLEQRAAQTEADTAAARSRIETLEGSAAALRAEADSKAEGQSRLQEQVSAIGEQIAALNMKLASLEAEQDASQKALEELEDLRRDMAGDREQRAKMIAELKAKNDDLNAQILEQERKLQTIREENQSRNEAIQRLNKEKLELEGQRNQADRESRDKNTELLSMEREVSVLEQKKLSSSMEEKGILDKLWETYELSHEAARQQRVELESVPKAQRRIGELKKSISGLGNINLDAIEEFQRINERYTYLKDQRDDVQKSKKELEGIIADITAEMKTIFSNRFAIINQAFGETFQSLFGGGRATLELEDPDDILNCGIEIKVQPPGKALKIITLLSGGEKAFVAIALYFAILKVSPTPFCVMDEIEAALDDANVVRFAHYLRQMSDKTQFIVITHRRGTMEEADVLYGVTMQEQGVSRILTINLNDVERELNIK

SEQ ID NO: 284 - protein, 402 aa, Ruminococcus torques
MADRFRILEKERERKKRMIRFLFFFLAMICLISEGMWSARMYGFQTHIFSGAEEMYMPRLAYLNRSPQKTVHEFFIEQSYLFLPTAGYAMEHRREGFTAEDQETVAQILEAQANDENCIDENGNLISKESPETAQNVQPSGETSLSSVDMSIERLRDFDYLLSNFYTVDSSTMIGPEQLNADDLLGRSMKINKKEDGPKVLIFHTHSQEEFVDSIPGDPATSIIGIGEYLTELLNKRGIKTIHDTGVYDIINGQLDRSNAYENAEASVRPILEANPTIEVAIDLHRDGVAEGTHLVTEVNGKPTAKIMYFNGLSRSRTNGDIDYLYNPYIQDNLAFSLQMQLASERMYPGFARHIYLRAYRYNLHLLPKSLLIEAGAQTNTVEEMKNAMEVVADTLCEVILE

SEQ ID NO: 285 - protein, 401 aa, Clostridium scindens
MKILSITAQKPNSTGSGVYLTELVRQFARDGHEQAVVAGVYEEDRIELPEGVGFFPVLFESRELPYPIVGMSDEMPYRSTRYCDMTWEMTRQFQDAFLKAIEKAVDALEPDLILCHHLYLLTAMARERFKEQKVYGFCHNTDLRQMKKTGLWRDYIREQIRGLDAIFVPQSAQKEGVMEIFGIDSGKIRILGMGYSQEIFCGPEKPDNAARGKDGAIRLIYAGKIAEKKGVKSLIKSLSYLPYPREGLKLSLAGGAGNKTEYQEIEELASKAPYPVEFLGKLPQPELAKAYQRSDIFVLPSFFDGLPLTVIEAIACGDKVVVTDLPGIRDWLKEQAPGAVVKYVPLPVMRNTDEAVSESLPAFERQLAGKIEECAREEGQERVDLSHLSWKNICKEILKSS

SEQ ID NO: 286 - protein, 193 aa, Clostridium sp. L2 50
MSLVPYVIEQTSRGERSYDIYSRLLKDRIIFLGEEVNDTSASIVIAQLLFLESEDPSKDISLYINSPGGSVTAGLGIYDTMQYIKCDVSTICCGMAASMGAFLLAGGAKGKRFALPNAEIMIHQPSGGSQGQATEIEIAAKHILKTKEKLNRMLSENTGKPYETIAADTERDNWMSAEEACAYGLIDSVIAKR

SEQ ID NO: 287 - protein, 467 aa, B theta WH2
VPQDPNDEPASVLLERIKAEKERLIKEGKIKRSKKSGSSDTLHYENVPFEVPSSWVWCRLEDIVCELKYGTSEKSSSVGKIAVLRMGNITNVGTIDYSNLVYSSNDEDIEQYSLEKDDLLFNRTNSSEWVGKTAIYKEEQPAIYAGYLIRIRPLLISSDYLNTVMNSGYYRDWCYDVKTDAVNQSNINAQKLSQLMIPIPPLKEQGRIVAEMDKWISLIDIVKNGKDDLLTIIKQAKSKILNLAIRGKLVPQDPNDEPAIELLKRINPDFTPCDNEHSRKLPQNWCICRLKDLCSFLSRGKSPKYSENDKTYPVFAQKCNFKDGGISLEQARFLDPSTICKWSETYKLRTGDILVNSTGTGTVGRTRLFHESYLGQYPFVVPDSHVSVIRVIDDIIPQYLYAYISSSFIQRYLQDNLAGSTNQKELYIGVLENLVIFVPPFIEQQRIVQKIEELFTSIDEIQKALEV

SEQ ID NO: 288 - protein, 216 aa, Bacteroides capillosus
MKTILLIGLGRFGRHIAMKLNELNHQVMAVDKDEEKVNAVLPFVTNAQIGDSTSEEFLSALGVRNFDVCIVAIGDNFQSSLETASLLKELGAQKVVARAARDVQAKFLLRNGADEVVYPEKQMAVWTAIRYSSDHISDYIALGDDHAIFEVEVPDSWIGKTIGQLDVRKRYHVSIMAIKQNGKFAMTVITPDTCLPAHSTILVLGTQRDIQKCFHI

SEQ ID NO: 289 - protein, 253 aa, Clostridium bolteae
MYKVIVVEDETMVRRGIILTIDWAALDCVIAGEAANGEEGAELAVRLSPDIIVTDVKMPRMDGVEMITKLREQGCRAKFIILTAYSDFKYAQSALRLGVSDYLLKPLRDGDLEQAVRHIREQMEERPAKEEETDAAPVLRFHSDKKSKNKYVEAATRYIREHYREDITISTVASFLEISEGYLSRVFKKETDYTFTNYLAYYRMQMAMNLLKDCRVKVYEVADQVGYSDTAYFSAQFKKILGVSPSEYQDRCR

SEQ ID NO: 290 - protein, 460 aa, Bacteroides capillosus
MKAKTVFYCTECGNETAKWAGQCPACRAWNTLVEQPAETKKKTASVLSASAAGQRRSGGGFNRPRPISEVSSTHELRFETGMSELDRVLGGGAVKGSLVLVGGAPGIGKSTLMLQICDNLCRFAKVLYVSGEESERQIKLRAERLHVNGEGLYLLSETNLDDIVEAVNELQPDILIVDSIQTLYNGELTTAPGSVGQVKDCTMTLMQLAKGQGITVFVIGHVNKEGSIAGPKVLEHMVDCVLYFEGEQNMAYRILRAAKNRFGATNEIGVFEMADTGLTEVPNPSEMLLSGRPENTPGTCVTCVMEGVRPVLAEVQALLAPTSFNVPRRTSNGFDYNRAMLLLAVLEKRGGLLVNSCDAYINVIGGLNLDEPAADLAMVMALASSFRDKPIPSDLVAIGEVGLTGELRAVNGLGQRLSEVRRIGFTKCLIPARNSGKLTEPEGLQLIRVRNIREALAAIL

SEQ ID NO: 291 - protein, 1468 aa, Parabacteroides merdae
MPKLAFHIEADYQKVIKLREEIDKLKSTISGMDGNTSPATFRAMEAQLAKNTKELDSLVVSAVRAGNEINQGFKKKIFDASQVVNGFSEKIIAQKSVIKGIEADVKRLGEAYRIALKRNPLSANKKLEEYNAVRKALDEEKAVLFDLTQQQAGARLSVKKLRDEYALYKDDAKEVVDSNNGIAISWKKVLAVIGGVGVLKALGSEIIRVRGEFQAADTAIQTLLGSKEKADALMSQVREYAKISPLEFSDVTQATQMMLGFNIEAEKVPRYLQAIGDVSMGDTQRFNSLTLAFSQMSAAGKLMGQDLNQMINAGFNPLQIMADKTGKSIATLKDEMSKGAISAEMVQQAFIDATSAGGKFYNMSENASKTINGQLSMMQDAMDSVFNELGQKSEGVIIKGIQTTTSLIENYETIGKVLAGLAATYGVYRTALIASITLTRSWAVAARVDAAAKGIQTIMTKAQTVAQLALNAAMKANPYVLLATIVASFTATMWVLHDSTTAVEKAQKQLSKEQEEAAHRKQELTSKTDSLISKINSETESVYSQVKAYKELIKLFPELGNVSLEEFKNLPQDQQNKMLSSVNEKREIDNAVKAYEADLKRIEDLKKKIQETESSPYNKSGNSWIHDVERLNKQLDTANNLAKLHKEEIDKIKEAQWEANTPVEEKVKHYEDVKRKLIEERDELDKTLTESEDIASVWVGVPDIISSIRLDALNKQIDETTGKINSLTRNSISVVQNKSYWEKQKQDAEAARNALDVSKKNSEDWSKYTKQIQEAQTQIDKYSDSTKREKQEKKEADKQLKQQKTIHNELLSLRRQNQQSEIDLMKEGSDKKIAQINLDYDNEIAAILAKEKEWKDAQGGKLSKEQTVEIHTALVNSYVKREQSTSNVNKEQLEEEKRAMNEYLKEYGSYLEKRQAITELYNEKIARATTEGERLSLAEGMKKELADVDNEAQKSTSIITRLFDDMSKKNITSIRAIADEAEKFLSFLERGEYSSDNSFGITKEQFDVLRKSPDQLKAIKDEIANVRHEADQMETSFNKVSNGLKKVFISESDARKLKEGLAEIEEGMSEIMQTGQFLSDTFSKLGDSFGGVFGGIAEGFSVAMDTVSSAMNGAKAGSMFGPLGASAGAAIGVVTSLAGAIAKIHDKKNEKRIQRLQDQIDTLDKSYGKLEKSIEKAYSKDASKMIEQNNKLLEQQKILIQQQIREEQDKKKTDDSRIKEWQEQIEEINDVIAENKEKAKDAIFGEDLKSAIDNFANAQAEAWASGEDRAESAKDTVKKMMRQMVTESIKAATESSGAMEKIRDKLKEFYADNVLSGWEQDYIYNMAEELQKEIDRQFGWADSLMKDEVEEPEKEEVSENSLKGAYAKASQESINLLAGQTGAVRVLLEDIRGSMQPIREQMRLIYDMQSRGWEDVKAIRELSDKVEKNTDRIAENTREIKEVAGKISENTRGTVDALEGTINVKVKM

SEQ ID NO: 292 - protein, 325 aa, Bacteroides capillosus
MFPMALVTSTEMFKKAYAGGYAIGAFNVNNMEIVQGITEAAQELKAPVILQVSKGARAYANHTYLVKLVEAAVIECPDIPIVLHLDHGDSFETCKSCIDGGFTSVMIDASSKPFAENIEITRKVVEYAHDHGVVVEAELGALAGVEDEVNVSAEDSHYTRPEEVEEFVSKTGCDSLAIAIGTSHGAYKFTAAQCTRNEKGELVPPPLRFDILDEVVRRLPGFPIVLHGSSSVPQEYVKMVNEFGGKMPDAVGIPEEQLRQAARGAVCKINIDSDLRLAMTGTIRKFFAEHPDKFDPREYLKPARANIKELVKHKLINVLGCDGKA

SEQ ID NO: 293 - protein, 403 aa, B theta WH2
MIAKAKAISHGINDIRYITGESQHKKHPEKIYRVLDNLLPSEPDAMGIWSSMQLTLSQHRPIKNSVIRIELSPSPEHTQFYDIEDWQNLWQEFAEEFDKQVITGKDGQVRSCPTNLVGSKYSVWLHTESKGEVPHLHAAVCRLDENGNINNDHNIHLRAQRAAERVAKKRGWTTAAQIRNRNIPQVNRDCMEVLKAMPSWSWDEYKNALIRKGYTVHEREDKKGILRGYALMNGNTKYKASELGIGRNLMVSKLPATWEKLHHQPATAIRNNTPQAVQQAAIHKIAPIDYTQYLTYSQEMISYTLSHEGKDYKFYIPEKVLDCFNDEFDYRFIANCQELTDMAVAIFVGLIDTPNVTTGGGGGGSQSDLPWRDKDEDDLLWARRCARAASRFLGKKPKTGLKR

SEQ ID NO: 294 - protein, 403 aa, Anaerotruncus colihominis
MEKPVMELNEQYPVLLLTGPRQVGKTTMLEHLIEVEGKGRKKVSLDDLTLRELAKTDPKMFFQLYQPPLLIDEVQYAPELFPYIKIMVDERHQPGDFWLTGSQLFKMMEGVQESLAGRVALLHLSPLSQSEIMKRPPEPPFSLELPLLSERQNGRQMLNTPEVFQRIHQGGMPALVTGTYSNASIFYSSYIDTYMERDVRRLSNDIDSLKFLRFLRSVAARTSQQVNYKGIADDAEIDQTTAKNWLHVLEALGIIFLLEPYSNNVLKRTVSTPKLYFYDSGIVCYLTRWSSPETAMEGAMSGALLENYTVAEIIKTYQNAGQEPFLYYYRDKDAREIDLILERDGKLFPIEIKKMASPPKKLTKVFDLIDKSPLQRGTGAILCMADQLGAFDQNNLIVPISLI

SEQ ID NO: 295 - protein, 341 aa, Bacteroides capillosus
MITQRLTAQDIQEAAEILKRGGLLGIPTETVYGLGASGLDPEAVAHIFAAKGRPQDNPLILHVPSADWLERYCEDIPDAAYALAERFWPGPMTMILRRKPIVPDAVTAGLDTVGMRCPDHGVTRAIIAAAGVPVAAPSGNTSGRPSPTSAADMLEDMDGKIDGIVDGGPCTVGVESTIIDLTLTPPRLLRPGGVTLEQLRDALGEVDVDQAVTRLMGKDEHPRAPGMKYRHYAPEAPVTVVKGPADKTAAYIRDHLGPKSGVICFDEFAGDFSGYPVETMGPAADKEEQARRVFDALRYFDSTDVEEIWSQCPDDGGIGLAVSNRLNKAAGFHIVDLNENS

SEQ ID NO: 296 - protein, 215 aa, Anaerofustis stercorihominis
MILKNGGNKDMNIYGYVRVSSTDQNEERQMIALRETEVPAKNIFMDKQSGKDFDRPNYKKLVKKLKAGDLLYILSIDRLGRNYEEIQKQWRILTKEIGIDICVLDMPLLDTRNGKDLMGTFIADLVLQILSFVAQNERENIKKRQAEGIAAAKARGVKFGRPEKEVPEDFGKIVHAWEQKRLPFEEVLNQCNMSEATFYRRLREYRLLKGEKMKG

SEQ ID NO: 297 - protein, 529 aa, B theta WH2
MAKKTTEKDVLIVRDEKTGEISVVAGLNADGSPKRTPAKAENAQSFLQFDRHGDVLDNFFKNFFRQCKEPSRFGFYRVAADQADKLLEVIKDLLKDPEGNKEMLAPHKVDTSGYEKKVQEEQSAEKQEQPEQKQDDEPKKQEEMEQKNEQNQENPQQAQSNRGYQPIDESKINWKELEEKWGVKRDDLEKSGDLDRMLNYGKSDLVRVAPNFGGEAFELDARLSFKKDGEGNVSLVPHFIRKEQKLDEYKEHKFSDDDRKNLRETGNLGRVVDLVDRETGEIIPSFVSIDRKTNEITDVPANKVRIPERIGKTEITKQEQDMLRAGLPVRDKLIERKDGRKFVTTLQVNVEQRGVEFVPGTGRSPRAAQAQEAKNNPTQGQAQGTENTANTNKEQRRNTWTNADGSIRPISKWSGVDFTEQQKADYVAGKAVKLENVTDKQGFHATMYIRFNPEKGRPYRYDTNPDNAQKVAPSNESRTQVAVNSEGKTNEATKNLKEPLRKGQTAPKDTAQQQQQEKPQKKNNKGMKM

SEQ ID NO: 298 - protein, 127 aa, Parabacteroides distasonis
MKRSIITTDGNGNITLPTDISATAMSEWELCDLFGVTAPTFRAGLKALCKSGILREYGIRRSIRVSDNCCMEVYNLEAIVTLAFHIGTFGAERVRNAVLERLYLRKEKTSIFFSLNTNGISKSEYFS

SEQ ID NO: 299 - protein, 308 aa, Bacteroides fragilis
MIGKIKKGSGFKGCVNYVLGKEQAALLHADGVLTESRGDIIRSFCMQTGMNPDLKKPVGHIALSYSAVDAPKLTDEKMIQLAQEYMREMKITDTQYIIVRHQDREHPHVHIVFNRIDNNGKTISDRNDMYRNEQVCKKLKAKHGLYFAGGKEQVKQHRLKEPDKSKYEIYHAVKNEIGKSRNWQQLQERLAEKGITIRFKYTGQTSEIQGVSFSKGEYTFKGSEIDRSFSFSKLDKCFGDVGQTTAGSNKQAVTAPIQKSVSAPDKTDNSFITGLGGLFSGLSAPADEMPDDSFLRKKKRKKKKQLKL

SEQ ID NO: 300 - protein, 593 aa, Eubacterium dolichum
MIAKLKALHYNEYGFHVSKGDMDMKFMKKLLVASLAMVCAFGGAKLTSGTVTTVKAAENENLKSVFSIDAGRKYFSTEQLKTIIERAYKNGYTDVQILLGNDALRFFLDDMSLEVNGKQYDSNAVKEALTKGNQSYYNDPNGNALTQAEMDEILAYAAERGMNIIPVINSPGHMDSILVAMETLGIQNPQFDGSVRTVDLDNEEAVAFTKALVKKYAEYFGSKSVEIFNLGCDEYANDKNTGGWANLQKSGLYKKFVAYVNDLSAIVKAAGMKPMCFNDGIYYNSKEEFGTFDKDLIISYWTSGWWGYDVAKPSFFAERGHKILNTNDGWYWVIGNYDKSEHGNGYTYDSAVNGIKGKDFTSVTGAKPEDNLDLIGSMQAVWCDYPEEVYEEDVVLGLMDLFSETHSEYLIRPADYTKVDEAISKIPTDLSVYTDESVKVLNDATAAVIRNKRVTEQAVVDGYADAINKAVEGLVFKAADYSKVDQAIEKANALNKKDYKNFELVEKAINAVERGLDIRSQDKVDAMAAAIEEAIANLELNKGQEQGTTKPENGTSGNVNTGDSTNMLAWGVLLAASLGLAGFILVKKAKARE

SEQ ID NO: 301 - protein, 258 aa, Bacteroides capillosus
MREQKDRRREPEAEADGMIEGRNAVIEALRAGTPIDKIFLARGETDATLGHIASSAREKGIVVVEADRRKLDGMSRTHAHQGVIAMAAVREYATVDDILNAAREKGEPPLIVVCDELSDPHNLGAVIRTAECAGAHGVIIPKRRSAGLTAVVAKTSAGAVSYVPVARVPNLTALLKELKDEGLWIFGTAADGNTTLYDADLKGPAAIVIGSEGDGMGRLVSEQCDFKVSIPMKGKLNSLNASAAAAILLYEAVRQRGL

SEQ ID NO: 302 - protein, 153 aa, Clostridium sp. L2 50
MKMTTLCYIEKDGKYLMLHRTKKEKDINKNKWIGVGGHAEETEGPEDCLLREVKEETGLTLTSYQFRGLITFISDVCEPELMCLFTADGFTGSLTACNEGELEWVDKSIVPSLPTWTGDAIFLKLLLEDEQRFFTLRLVYEGDELVEHRLEFY

SEQ ID NO: 303 - protein, 336 aa, Parabacteroides merdae
MIKVGINGFGRIGRFVFRAAQKRSDIQIVGINDLCPVDYLAYMLKYDTMHGQFDGTIEADVENSKLIVNGKEIRVTAERNPADLKWDAVGAEYVVESTGLFLTQEKAQAHIEAGAKYVVMSAPSKDATPMFVCGVNEKSYVKGTQFVSNASCTTNCLAPIAKVLNDKWGITDGLMTTVHSTTATQKTVDGPSMKDWRGGRAASGNIIPSSTGAAKAVGKVIPELNGKLTGMSMRVPTLDVSVVDLTVNLAKPATYAEICAAMKEASEGELKGVLGYTEDAVVSSDFLGDTRTSIFDAKAGIALTDTFVKVVSWYDNEIGYSNKVLDLIAHMASVNC

SEQ ID NO: 304 - protein, 850 aa, Bacteroides capillosus
MSKKPQYDPEEIRYPNQHIEVSPLVPEMEKSYIEYAMSVIVGRALPDVRDGLKPVHRRILYAMYEDNLTADKPFKKSATCVGDVLGRYHPHGDASVYDALVRLAQDFSMRYMLVDGHGNFGSIDGDPPAAYRYTEARLSKISDEMLRDIEKDTVDWDPNFDETRKEPKVLPSRFPNLLVNGSSGIAVGMATNIPPHNLTEVINATICVLDNPEAELCDLMEHIKGPDFPTKGIIMGRSGIRAAYATGRGRLCVRARTEFEEFGKDRTRIIVTEIPYQVNKRMLIKNMADQVEDKRLDGISDIRDESDRNGMRIVIELKRDANPQVVLNRLFAQTQLQTTFAINMLALVEVNGKLQPRILSLRHILDEYIAYQEQVIIRRTKYDLKKAQERAHLLEGLLIAQDNIDEVIHIIRSRYDDAKEKLMERFSLDDVQAQAILDMRLKALQGLDREKLENEYKELEARIAYFQQLLGSEEMLRGVLKDELIAIRDKYGDERVTEIQDVEDEIDIEDLIEEEECVFTLTAGGYIKRLPASTYKTQRRGGKGITAMATKEEDYVDTVFTASTHDFILFFTNKGRVHRKKGYQIPEAGRMAKGTNLVNILPVESGEKVTAMIHLREFPEDRYLAMVTRNGTVKRIQLSAINTARKAGIRCITLDEGDELIAVRETDGDQAILIATHDGMSICFKETDVRCMGRDACGVRGIKLREGDYVIGAARAKAGHQVLMVTENGYGKRTDMDEYIRSDGPQNRGGYGLKGYNVTEKTGPVVGVKVVSDADDILVINDAGVIIRMAVSGISTYGRAAQGVKLMNLDEGVKVISFARTDHEDEETAQEEEMPSSDASVSTPSEPVVE

SEQ ID NO: 305 - protein, 310 aa, Clostridium ramosum
MNEKLELLINEVKKAVLGKDDVLKKVVIALLANGHILLEDIPGVGKTNLAVALTKAIQLDYQRVQLTSDVLPSDLLGYSVYDFETKEMTFKKGPLFTNIFLADEINRTSSKTQSALLQVMEEGMISVDGLTYPTAKPFIVIATQNPFGSAGTQMLPDSQLDRFMMRLSLGYPDEMSEIEIINRKKSGNPINSINPVLSPQELLMMQEAVTKIHLDESLVKYIVQIVQQTRIHEKIELGASPRASIALMKAAQASAYLNGRDYVIVEDINENLYETLNHRIFLMPSVKKNRENFQIIMEDIMMKIAPIAYK

SEQ ID NO: 306 - protein, 47 aa, Bacteroides uniformis
MLTAIIRSCTGGEARTPDTRFWRPVLYQLSYSRVCGCKGNANFQICK

SEQ ID NO: 307 - protein, 127 aa, Ruminococcus gnavus
MLKYVETKNAPAAIGPYSQGIICNGIAFFSGQIPLSPITGEVVGTTIEEQTEQVMLNIKALLESQNADFTDVVKTTCFLADMGDFAAFNEIYAKYFTGKPARSCVAVKDLPKGVLCEVETIASIREE

SEQ ID NO: 308 - protein, 1166 aa, Bacteroides uniformis
MAKSDKTVKRGVYLYIDGKEIKNDINSIDLEMKRLQRDIKEMTRGSEEYNRTMAKIQHLQGILKQHRQEIKGITTETKKATVSIGSMVDWFNRFGGVILSVIGFLTGFTLALRAIRDERNKLEESQAGLKALTGLDDDSIAWLTGQAKTLSTTMTKEGLRVRQSAAEILDAFMLVGSAKPELLGDKEALKAVTEEAMRLQAAAKDITLNEAVDSLTLSLNQYGAAADQAGRFTNVLAAGSQAGSANIASQAKAIRNAGTAAASANVPIEQTVALIETLAYRGIKDEVAGTGLKKFFLVLQTGADETNPKIVGLDKALENLKNKNMDAGAIKKMFGEEGYNTASVILQNTEMVKDFTAAVTGTNVAYEQAAINSDTAQAKLEQARNKMKLAAIDLGEKLNPALTVSTNMLTNVLKYLPGLIDWCKKWGGTVLWLSTILLVYATRLKIITAWYSIWNSLTKIATVLNLAYAASMNTLSGYTVTSFGNLRKLSMLMQGHSVLLKSLRTATYLYAAAVQVLHGRVDLAAKSLKAAWTIMSSNPIGLLVTLVLAAATASYKLTQRTKAYYDLNKVNEKITEKSNDEYARQSSLIEQLTTKIHNNNLSNFERKKAIVQLQAIIPDYNAEIDKEGKIINENTEALDRYNAVLATNIELKEAADELDKHRINLMRLQKSPALSDNSPMGSMAREDVRNKISQEEEIVESLTARYKKLVQEKWKALNPNTPKNNPTGGNDGGKCPICGNKPCTCDKNNTSKDKFAQAEADYYRRIADIKRKYLADDKMTQEEYNKQMRDAEIQLLNDKLKVKGLEPSEIQRINDQILDAEIKARDELRRLDEQSAKDEEKRRKEQAEETFSRLDKEYQMQVEAAAMYHYENRTSEEEYFNELRRLQDVYYHKVLNDAAISEEKKNQVREQMRKRNLKDAQKDAEEEKRIEREKFDILSDLAKGFGETMAQFFTDSEVSLKDFLKNILTMSLDALERMMIMAVTERTIKNIGSLGFVGVAKAAGEIALITAAFETAKGLISNFYTGGFTPSGDWNQPQGIVHSNEFVANRFAVANPNLRPIFDAIDVAQRSGNVGNLTAEDIAAVAGSGKSTRTVPAKAPAASATTTTNDPAMVAMLIECTRVLRKLKNRLDAPLVAETYVTGKRGINQAQKEYQKLNNNKSRNKQ

SEQ ID NO: 309 - protein, 513 aa, Bacteroides capillosus
MAAYCRVSTDSEEQINSYTAQKAYYTQKIEESPDWELAGIFADEGITGTSMKKRKEFNRMITACKRGGIDLILTKSLSRFARNTVDCLETVRMLKARGIGVIFEKENINTLTESSEFLITLFSGFAQAESESLSSNIQLGIRMAMKEGKVNFHYRSMLGYQRGADGKPEIVPEEAEVVRRIYRRYLEGCSEGQIQRELTQDGIATAKGVKAWSHQIVHNILTNEKYVGDALLQKTFTTDCISKKVKKNTGELPQYYIKDNHPAIIPRDIYQRVQEEMARRTSKRKILQKSGKTEQGKYSAKYALSERLVCGECGSPYKRCTWARNGVKRIVWRCVSRLEFGKKYCHESPSVEEYKLHAAILTTLNRVVEASNGLQEELAETLRMVCVPGGDGDDLLDLEHELEVLTARQNTLLDQALANMDDLTITEQLKTLLEEKQHLQARIDAVKTEAANRISEDSRMAELTAYLEEHLSGFQQYDDGIVRQLVERITVVDAETIRIKFRYSDVEIEQAMC

SEQ ID NO: 310 - protein, 302 aa, B theta WH2
MEEYKLSHLKELEAESIHIIREVAAEFENPVMLYSIGKDSSVMVRLAEKAFYPGKVPFPLMHIDSKWKFKEMIQFRDEYAKKHGWNLIVESNMEAFHAGVGPFTHGSKVHTDLMKTKALLSALDKYKFDAAFGGARRDEEKSRAKERIFSFRDKFHQWDPKNQRPELWDIYNARVHKGESIRVFPLSNWTELDIWQYIRLENIPIVPLYYAKERPCVEIDGNLIMADDDRLPEKYRDQIKMKMVRFRTLGCWPLTGAVESNADTIETIVEEMMTTTKSERTTRVIDFDQDASMEQKKREGYF

SEQ ID NO: 311 - protein, 556 aa, Bacteroides uniformis
MFFLVKKYIMRKLNSKLLYVFCALLFFSAFTSGKKDIITIFMIGDSTMANKSLKNGNIERGWGQMLPEFLIGDVRVDNHAMNGRSSQSFIDEGRWDVVLSKLKSGDYVFIQFGHNDEKSAEELHTIPGSTFDENLRRFVRETRAKGAYPVLFNSIVRRNFPPEGTIGHKGSYETEGSTLVDTHGEYLESPRRVAKEMDVPFVDLNKLTYDLVVSMGVEKSKSLFMWVPTGIYDFCPKGKIDNTHLNISGGKVVAGIAMEAVAKVVPELAAYMRSHDSEVYVADYKDDKQCAISYTFDDGLEEHYTLVFPEMEKVGFKGTFWIWGKGIENVTEQQDKPRMTWTQMKEMFDKGHEISSHGWSHADLRHLSLEEVKAEVGRNDSIIQAEIGERPLTFCYPFNSYNEDVRRIVSENRIGTRIKQYAIGGEKSKSTVESLDKWVKELMISNDWGVTMIHGISTGYDAFTSPDILWEHFRRVKNQEYDIWVGTFREVAAYVKERRNVQLDIVKKESQWAVIPRLLLDKELFNEPLTMVLNKKGKGKVKVYQNGKRLLVKKTG

SEQ ID NO: 312 - protein, 300 aa, Clostridium sp. L2 50
MFIWDFVADTVLGQIIDWLYGQIVGFLGDFFMQMGSMGAELFEMSWVQSVVLLFYYLAWALYVTGIVVAAFECGIEYQNGRGSIRDTALNVIKGFLAASLFTTVPVELYKLSISLQGSFTAGITGLGEDIGTVAAGIVQSLQDAATWQEAATSGVFGGIGSISSPIFMIFLLILMGYAVIKVFFANLKRGGILLIQIAVGSLYLFSVPRGYIDGFVGWCKQVIGLCLTAFLQATVLIAGLMVVKDQALLGLGLMLSAGEIPRIAGQFGLETGTKANVMGAVYAAQGAMNLTRTVVQVVSK

SEQ ID NO: 313 - protein, 120 aa, Bacteroides capillosus
MTPKETAIVLAKALDSKKGIDIKVLETGHLTTLADYFVICTATSTTQVRALSDECEKTMKETAGELPHHVEGHRGGTWVLLDFSSVVVHIFMDDARKFYDLERLWSDATPVDLTDVLTEN

SEQ ID NO: 314 - protein, 230 aa, Clostridium scindens
MVIQGLQKLTLLDYPGKVACTVFTAGCNFRCPFCHNASLVIDTYKNEEISLEEVYSYLKKRQGILDGVCVTGGEPLIQHGIEEFLGNIKEMGYAVKLDTNGSFPEKLKKIVSAGLVDYVAMDIKNSRESYGKTIGIEGYDTGNVEKSIQYLRSGSVPYEFRTTVVQEFHRRSDFESIGKWIEGADKYYLQQFVDSGDLIQDGLHGYNKDIMNQALEVVKKSVQMAELRGL

SEQ ID NO: 315 - protein, 441 aa, Bacteroides capillosus
MKPLVAIVGRPNVGKSMLFNRLVGQRLSIVEDTPGVTRDRIYAECEWRNRKFDIVDTGGIEPNTDSEILSFMREQAEIAIRNADVTVFVCDIKSGLTASDQEVANMLLRSGKPVVLAVNKMDQVGMTNPDIFEFYNLGLGDPIAVSAVHGHGTGDLLDACFQYFPPEDQVEEQDDVIKVAVIGKPNVGKSSLINRILGEERVIVSNMAGTTRDAIDSYYENDKGKYILIDTAGMRKKSKVDDRIEKFSVLRATMAIERCDVCLIMVDAQEGVTEQDTKVAGLAHEAGKACIIVVNKWDAIEKDDKTMDKMRQDVRRDLSYMTYAPILFISAKTGQRVERLFELINYVNDQASLRITTGMLNTVLADATARVQPPTDKGRRLKIYYMTQVGIKPPHFVVFCNDAQLFHFSYQRYIENQIRNTFGLEGTPVVLTVRQKGDKED

SEQ ID NO: 316 - protein, 144 aa, Bacteroides capillosus
MPNAKVLSEKQAIVADLTEKIKGAASGVLVDYKGITVAEDTALRAELRKNDVDYAVVKNTLVRFAINNCGMEALDDVLNGTTSLAISHGDPIAPMRVVNKFAKQFNGAKFTIKAGFMDGKVLSLDEISALAELPSKEVLQAQVL

SEQ ID NO: 317 - protein, 417 aa, Bacteroides fragilis
MSENLIIFNAKVVTPLGFSARKGKEMAELRILEKATVEVVDGIITYVGPNRGEVRDGYYHHFWHYNARGKCLLPGFVDSHTHFVFGGERAEEFSWRLKGESYMSIMQRGGGIASTVQATRELSFIHLRSKAEGLLKKMTAMGITTVEGKSGYGLNRETELLQLKVMRSLNKDEGVRVDIVPTFLGAHALPDEYKERPDDYIDFLIRELLPVIQRDSLAEFCDVFCEEGVFSIEQSRRLLTAAGDYGLLPKLHADEIVPLGGAELAAELGAVSADHLLHASDAGIEAMARKGVVATLLPLTAFALKEPYARGRDMIDAGCAVALATDLNPGSCFSGSIPLTFALACIHMQLTVEEAITALTLNGAAALNRADSIGSIEVGKKGDFVVLDSDNYHILPYYVGMNCVNTTIKGGMLYPSV

SEQ ID NO: 318 - protein, 75 aa, Peptostreptococcus micros
MPAYSKAPRGLSVLSWVSRIFTTTTISPDPLLRQCPNHYTFRAGRNLPDKEFRYLRTVIVTAAVYWGLSSMLRLL

SEQ ID NO: 319 - protein, 402 aa, B theta 7330
MLSCTIDSTLGLRSKVYGYQYSEIIRSLMCVYFCGGSCVEDVTSHLMEALCLHPPLRTCSADTILRAIRELTTPNLTYRSDSGKSYDFNVASDLNNLLVNALLATGQLLPDNEYDFDFDHQFIETEKFDAKITYKKFTGYSPGIATVGDVIVGIENRDGNTNVRFHQEDTLKRIFERLENARIHINRARMDCGSCSEAMVEMVEKHSRHFYIRANRCVSLYDDIFALRGWKTEYINGHEFEICSIIAEKWVGKAYRLVIQRQRSINKELDLWEGEYTYRCILTNDYTSTDRDIVEYYNKRGGAERVLDDMNNGFGWKRLPKSFMAENTVFLLLTALIRNFYRHLISDANMKSFGLKRTSRIKTFVFKYVSVPAKWIKTARQHILNIYTSNDAYMMAFKFDFG

SEQ ID NO: 320 - protein, 680 aa, Bacteroides capillosus
MKIVGITGPTGAGKTTALRAVIALGGCVIDCDQVYHQLLEENAAMRNELTERFGRGILDSEQRLDRKKLGALVFQDKALLADLNAITHRYVRQRVEELLRAARTEGRPLAAVDAIALIESGLGELCDAVVGVLAPPEVRVRRIMARDGISEDYARMRVKAQQDDAFFRTNCTAVLENTGEEAAFARQATALFEKILNLGAESRSGQGGNIMEEKQKTLGELRREALLYKPKNGYDRLTAEDEAAMKSYCEDYKKYLDAGKTERECVDETVRQAEERGFKPFVRGMAVKPGDKLYRVNRGKAIMLAVVGNASLSEGVNIGAAHIDSPRLDIKPNPLYEDTEMCFLKTHYYGGIRKYQWVTIPLELHGVIAMKDGSVIKVAIGAGAGDPVFTVDDLLPHLAADQSKKPLSEAIPGESLNVLVGSRPFKDDEGSERVKLAILDLLNQKYGIVEEDFISAELTAVPAFRASDIGFDRSLIGSYGHDDRVCGYAALAALFALDGAPARTAVCMLADKEEIGSEGVSGMKSAAFDTFMSDLCDAQGVSLKACYERSFCLSADVCAAYDPNFPEAFEKRNSAYINRGMGLCKYTGARGKSGASDAAAELVAYTRRILDEAGVVWQMAELGKVDQGGGGTVAAYMAERDIDTLDAGVPVLSMHAPYETVSKLDCYMTYKGMKAVYEAK

SEQ ID NO: 321 - protein, 483 aa, Bacteroides vulgatus
MLVLRYVTHLLPCPVMCHGDVEKHSKSLWYSELLTTHARKTEPEINCSILHLFAYQPKALHQVILKSKKFRTMKSTFSVIFYLKRQVVKKDGTVPVMGRITVDGSQTQFSCKLTVYPKLWDTKGGRVTGRSTAALEANRLLDKMRVRINRHYQEIMERDNYVTAEKVKNAFLGLEHRYHTLMQVFSRHNEDYEKQVEAGMKAKGTLAKYKTVYKHLQEFLNIRYHVKDIALKELTPAFISDFEMFLRTDKHCCTNTVWLYVCPLRTMVFIAINNEWLTHDPFREYEIKKEETTRSFLTKDEIRLLMDGKLKNAKQELYRDLYLFCAFTGLSFADMRNLTEENIRTYFDDHEWINISRQKTGVVSNIRLLDIAKRIIDKYRGLCEDGRIFPVPHYMTCLHGIRAVAKRCGITKHITWHQSRHTAATTVFLSNGVPIETVSSMLGHKSIKTTQIYAKITKEKLNQDMESLAARLNTIEEFSGCNI

SEQ ID NO: 322 - protein, 130 aa, Bacteroides capillosus
MNCSEHYAADLLFYFDGRPLELSLYETLFAALDAAFPQVSVKVQKSQISFYGRHLFAAASLPVRRKKDWPEHCILVTFGLSHRVEDPRIAVAVEPYPNRWTHHVVMDKPEQIDGQLLSWLREAWDFSESK

SEQ ID NO: 323 - protein, 409 aa, Bacteroides stercoris
MKVEKFKVLLYLKKSGLDKSGKAPIMGRITVNRTMAQFSCKLSCTPGLWNPRESRLNGKSREAVEINAKIDKLLLDINAAFDSLLERKGDFDAASVKDAFQGSMKTQMTLMKMLDALRDEVKSRIGIDRAKGTYPAYDFTCRTMREFIETKFKTKDLAFGQLTEQFIHDYENFILDEKGYAVDTVRHYLAILKKTCKRAYQEGHSERFMFQHYVLPKQTVKTPKALSRESFEKIRDVEIAPHRTTHRLARDLFLFACYTGVAYSDAVTVTRENLYTGEDGKLWLKYRRKKNELRASVKLLPEAVALIEKYHDDSRDTLFPMIHYPSMRNHMKALAVLAGIKENLCYHVGRHSFASLVTLEAGVPIETISSMLGHSNIQTTQVYARVTPKKLFEDMDRLIEATGDLKLVL

SEQ ID NO: 324 - protein, 1205 aa, Bacteroides fragilis
MKLHIAMLAATLLLSGGASYAQGNKQEKKAKAYMVADAHLDTQWNWDVQTTIKEYVWNTINQNLFLLKKYPNYVFNFEGGVKYAWMKEYYPAQYEEMKKYIGEGRWHISGSSWDATDALVPSTESFIRNIMLGQQYYRQEFGVESTDIFLPDCFGFGWTLPTIASHCGLIGFSSQKLDWRVHPFYGKSKHPFTIGLWKGIDGSSIMLAHGYDYGRRWNDEDLSENEQLKELAGRTPLNTVYRYYGTGDIGGSPTLASVRSVEKGLRGNGPVEIVSATSDQLYKDYLPYKNHPELPVFDGELLMDVHGTGCYTSQAAMKLYNRQNELLGDAAERAAVTAEWLNQAKYPGSTINEAWKRFIYHQFHDDLTGTSIPRAYEFSWNDELISLKQFSNVLTSSIHGIGRELDTRVSGIPVILYNALGFAVTDIAEIELDLPKAPKGITVYDEKGKKVSAQLISYTDGKARILVEATVPATGYVVYDIRTSGTGASNVSTNVNTLENSLYKITLDKNGDIVSLTDKKNGKELVKAGKAIRLALFTQNKSYNWPAWEVLKETTDRTPVSITDDVKITLVEDGTLRKSLCVEKRHGESVFRQYIRLYEGSRAERIDFYNEIDWQSTNALLKAEFPLNLENEKATYDLGIGSIQRGNNTETAYEVYAQYWADLTDRDGSYGVSVMNDSKYGWDKPDNHTIRLTLLHTPETRGGYAYQDHQDLGHHTFTYSLIPHQGALDKPATVEKAEKLNQQLKAFRTEKHKGNVGKSFSFVASDNRNVLIKALKKAEETDEYVVRVYETEGRKAQSATLTFAGEIISASEANGTEKTIGNATFEGNKLQVNITPYSVRTYKVRLKPSGREASPIEYAALPLDYDRKCASYNEFRGEGDFESGYSFAAELLPDSLIAGQITFRLGEKEIANGMTCEGDTLQLPAGNKYNRLYILAASTEGDNQADFRIGKQTASFVVPSYTGFIGQWGHKGHTEGYLKDAEIAYVGTHRHASNGDQPYEFTYMFKFGMDIPKGATSVILPRNEKVVLFAATLVAENEPATTVAGTLFRTNNVGNAATAGNDEEAVRENILKRAKIIACSGYTNDEEKPDFLLDGKTDTKWCDVSQTPNYVDFDLGEAQNISGWKMVNAGQESHSYITNGCFLQGKMNPGDEWTTLDAIDGNHANVVSRPLNYDGKVRYIRLLVTRPTQSTGGRDTRIYELEVYK

SEQ ID NO: 325 - protein, 839 aa, Bacteroides capillosus
MRDSWTSLITEGSSGVEQVILAKVALSAATFAIDKPYDYLLPDELRESASPGMRVLIPFGAGNRRIEGIILALGQGQRNAKLKAVIALLDDNPVLDSESIQLALWMRERYFCTVYEAARAMLPAGLYFSLQDQYHIVEGVDKETAYEAAGRSEHARRILDLAYACGGTAEMGQIRGAFGTKDPNPAIRLLTERGILTLETSASRGVGDKTEQVVSLAVPPEEALALTAPKRKTAPLRYAVVELLSAIGQASSKEICYFTGASPATLRSLVKSGLVVMEKREVFRRAAPEQGEPAAPVVLNEEQTAAFEGIDKLCAAGKSAAALLYGVTGSGKTQVYIRLIQETLKRGRSAMVLVPEIALTPQLLHIFTSHFGDAIAVLHSSLRTGERYDEWKRVRAGKARVVIGTRSAVFAPLQNLGLIVLDEEQEYTYKSENVPRYHARDVAKFRCARSGGVLLLGSATPSVESMYLAKTGVYHLFTLRSRYNTRALPQVRIVDMKRELRGGNGSDISQQLREELKANLERGEQSILFLNRRGNSRMAACGECGEVPSCPRCTVYLTYHSANGRLMCHYCGHSERLPDACPHCGGSFHFIGTGTQKVQEELEALFPGSEVMRMDTDTVSAVQSHEKLLSRFEKEKVPILVGTQMVAKGLDFENVTLVGVISADLSLYVDDYRAGERTFSLLTQVVGRAGRGEKTGRAIIQTFTPENEVITTAATQDYDTFYQQEITMRRVRGCPPFRDLFVLTASGTEESRVLRMCVRLRRTLESWFADPAYQGLDVQLLGPAPASVAKVNNRYRYRLTISGHNSKTMRALVAALLCAAHNDKEMRGVSVFADVDPMD

SEQ ID NO: 326 - protein, 642 aa, Bacteroides capillosus
MISYHNRQVAHHEIDHIFQDLFPSHGMTARPSQIELSHKMLDAMIHSKIALSDAGTGIGKTYAYLVAGVSFSRALSRENIPFQPILISTSSIALQTAVREEYIPFLSSVLLEDKLIQAPIRAVIRKGKSHYVCDERLMRRLRQVDLERKNPLAAQALLSLRDHLDADQAPHLSQYDRNRVCVPTICDCRRDSCRYLCYMEACNSDRYLFQICNHNLLLADAIHRGSGHRPILPDVGALIIDEAHKLPETARQMFGITLAAKDIRTLIRTLRAERYLLASESLADMASALLKLMSLPPDGNRPFSDYVRHMIGPARTLATIQRQLSGVLTPTARKELDRISSAVHLFLEERSDLVFYTAADDDGGTLLCASISDLTAQLQATLWSQPQPVLLTSGTLAIGKDFCRFKEEAGLTGNSRVEESVSPSPFDYRKNCLLYFPAMPPKQHEVDYFDKLAEEIRTLLIAVHGHALVLFTSYAGMSAVKDRLKQQPLPFPLFTMGRNAPHTMAQFKAAPGSVLFATGAAWEGFDFPGDCVSLLVIPRLPFQYPDALQEKKREAYPDLRTFIRAVAVPEMQIRLKQGFGRAIRLETDTCAIAILDERAARGSRYFQDVQSALPEMPITSSIYAVERFIQRVKDESYFEEAA

SEQ ID NO: 327 - protein, 602 aa, Bacteroides stercoris
MRSPEQVLKALNKHGKVSDYKFERLYRILFNEEMFHVAYQRIYAKPGNMTPGTDGKTINRMSLQRINKVIASLRDESYKPNPAKRIYIPKKNGKKRPLGIPSFEDKLVQEVVRMILEAVYEEVFANTSHGFRPNRSCHTALTHIQKTFTGTKWFVEGDIKGFFDNIDHNVLIATLRKRIADDRFLRLIRKLLNAGYIEDWKFHNTNKGTPQGGNISPILANIYLDNFDKYMEEYALRFNKGKERHITKEYKQLSDKMQRILKSIKNIQDADVRLQLRDEYEKLRRERQKIESRDSMDETYRRLRYVRYADDFLIGVIGSKAECVKIKSDITKYMEENLKLELSQEKTLITNAQKPAKFLGFDVSVRKSDAIKRDKNNVPARYYNGKIVLKVAIETVRNKLEEYSAIRYKVENGRQVWFAKFRGNLMKKKIEDIVAAYNSEIRGFYNYYCIANNVAYALSKFGYIMEYSMYHTIAGKTNSTVSKVIDKYKVGNDIIVPYQDAKGKLRYRKFYNEGFKRKPPMYYTEVNDLSYTIAIPQPTLTERLDARTCELCGKVGPVVMRHVRKLNQLKGKTECDRLMLEKHRKTLVVCEKCYAKIHSHAK

SEQ ID NO: 328 - protein, 139 aa, B theta WH2
MTKKEAIKIFEEKKVRTAWDDETEEWYFSIVDVVSILTESVDGRKYWNKLKQRLKEEGNETVTNCHQLKMLSADGKMRFTDVATTEQMFRLIQSIPSPKAEPFKLWMAQTAKERLDEMQDPAKEVLRLEQNKDKSNKEQ

SEQ ID NO: 329 - protein, 169 aa, Bacteroides capillosus
MERETTCCFTGHRPDKLPWRDDEWDPRCQALKERLTAALEEAYDKGMRHFICGMAKGADFYFCEAALALRDRRPGVTVEAALPCEEQAARWNERDRNRYFRLVAQCDYETMVQHHYDKGCMLRRDRYMVDRSAMIIAVYGGVLGGTMYTLSYAMKKGLELKILDVEVQE

SEQ ID NO: 330 - protein, 401 aa, Parabacteroides merdae
MKACFMGLGYIGLPTAIIAAKHGIQITGVDINPQVVDMTNAGHLHIIEPGMEEMLQEVVNAGSLKASIKPEVSDAYFMVVPTPFKGNHEPDVSYVEAATRAVLPLLKEGDLYVIESTSPVGTTEAMARLIFSERPELEDRIYVAYCPERVLPGNVIYELIHNDRVIGGLNPESTDKAIGFYSQFVQGTLHRTNCRTAEMCKLTENSSRDVQIAFANELSLICDKAGINVWELINLANKHPRVSILQPGCGVGGHCIAIDPYFITADFPAESKLIADAREINNYKSFWCAEKVKNAMLEFELKHHRKPCVAMMGLAFKPNIDDLRESPAKYITTKVMQSCNNANILVVEPNVKEHHVFKLTDYKEAYDKADIVVFLTAHTPFKELEWREDKVILDFCGIFKK

SEQ ID NO: 331 - protein, 555 aa, Bacteroides caccae
MYTDKKNILQLVALLEAHGITKVVLCPGSRNIPLVHTLSNHPNFTCYPVTDERSAGYFAIGLALNGGKPAAVCCTSGTALLNLHPAVAEAFYQNVPLVVISADRPAAWIGQMDGQTLPQPGVFQNLVKKSVNLPEIHTEEDEWYCNRLVNEALLETKHHGKGPVHINVPISEPLFQFTSDALPEVRVITRYQGLNVYDRDYNDLIDRMNKYQKRMIIVGQMNLIYLFEKKHTKLLYKHFAWLTEHIGNQTVPGIPVKNFDAAIYAMPEEKIDQMTPELLITYGGHVVSKRLKNFLRQHPPKEHWHISPDGEIVDLYGALTTVIEMDPFEFLEKIASLMDNRTPEYPRVWENYCKIIPEPDFAYSEMAAVGALIKGLPESCALHLANSSVIRYAQLYSVPSTVEICCNRGTSGIEGSLSTAVGYAAASDKLNFIAIGDLSFFYDMNALWNVNVRPNLRILLLNNGGGEIFHTLRGLDMSGTSHKFIAAVHKTSAKGWAEERGFLYLQAENEVELAETMQIFTQPEEKERPLLLEVFTNKNKDARMLKNYYHQLKQK

SEQ ID NO: 332 - protein, 406 aa, Anaerotruncus colihominis
MAFTFVEGGVCAAQGFSAGAVHAGIRKNHDKKDLALIFADRMCSAAAIYTQNKVKGAPLIVTREHLQNGRARAILCNSGNANTCNADGLDIAAAMCKSAAQALKIAANDVVVASTGVIGQPLPLGPIKDAMPALAASLSTGGSGDAAEAIMTTDTKRKQVAVRFPIGDKLCTIGGIAKGSGMIHPNMATMLCFVTTDADIAPELLQKACKDVADETFNMISVDGDTSTNDMLAILASGAAANEPIKSLGKEYYHFQQGLMIVCRRLARELAADGEGATKLLECAVTGAPDCQTAKKVAKSVICSSLFKAAMFGGDANWGRVLCAIGYTDAEFDVSRVGVTLSSAAGSVPVCSNGAGVPFSEEQAAKILAQPEIRIEIDMAQGGETATAWGCDLTYDYVKINGDYRT

SEQ ID NO: 333 - protein, 1104 aa, B theta WH2
MLGVLSYLNLGTFSQAAPLTVDHTSVAGVQQASNDKKTIKISGSVRDAAGESIIGATILEKGTSNGVVSDMDGNFSMTVAANGILHISYIGYVDQDIAVAGKSLFNIQLLEDTEMLDEVVVIGYGTVKRRDLTGAIASVKGDEVAANPVSNVAQALQGRLPGVNVVSQDGRPGATISVRVRGGGSITQSNDPLYVVDGFPVSNIGDIPASEIESIDVLKDASSTAIYGARGANGVILVTTKSAKEGQIKVSYDGYVQVKNVSKTLETLSAQEYILHNWSYAASRGTANQDAVEKYFGLGSKYGNHYADYANVKAHDYTDDVLRTALSHNHSVNVSGGTDKTKVIFTLGYVNDEGIKINSDYNRLNASFKIRQKLAKTLDLDVDFRYTESNLNGRENVTNGKGSNVSGAYRYRPIDNPLGGVSYSEVASGFSFGVANIDDKHNPVELINDITNKSYSRSLRGSAALSWEIIKGLVARSELSLTRSSSKSTYYENGYTNGDKRATLNRGMGDGLRSVSTLNYNFNIGKNNVFSALLGNEVLKSDSESSQITGRGYPSTFDYDTTMGLIHTATTSFSATNSYSVPARTVSFFGRLSYTFMDRYLFTGTFRADGSSKFAPDNRWGYFPAGAFAWRLSEEPFMNGTKDWLSNLKLRLSYGTSGSDNISSNLWRETWSSLGSGSNHTPINGELGSFYRPDGLLANSKLKWETTISRNFGIDFGFLNNRVNGSLEVYWNTTKDLLMAVPVDNTTGYSYQFQNFGKTSNRGIELSVNVDVINKGDFRFNVGAIYNYNRNKLDELPNADQYLYSSYWGSSSLVPTNDYMFVEGKAIGLVRGFISEGYYTVDDFNYTNGQYVLKEGVPDITKALTATYMHPYDLPAGQTAFPGAAKFRDVDESGTVDLDDATCLGEVMPRHTGSFQLNFNYKNFDLSTNFNWTAGGKVYNVAAMINASGQEFDGIGAQRASWVADAFKVYNVNAAGDLYAVTNPDELRALNANAKYHLPYHQSGITSSEWLENGSYLRLQTLTLGYTLPKNWLTKVHVDKIRLYLTATNLFTITGYSGIDPEVNANPTGQSGFYSDLRIFPTLNMDFGTYPRARTFTFGANITF

SEQ ID NO: 334 - protein, 877 aa, Eubacterium dolichum
MQRKYKVKDMQCAACAASVERVLNKLEEVDEASVNLVAEEVNIKAKDTLKEEQLFEAVRKAGFELFPTQPLHTQSFRVAGMQCAACAASVERVLNKREEIESASVNLVTSQVTLCYRQYRIEDWKRTVEKAGFQLLEEEHLEDIVLDIEGMSCAACVSSLEKALSQADGIQKAEVNVLLNNASITYDQKKIKLPEILQIIEKVGFQGHVKKETVQKEVQKDYTGLRVYVTLGVAAVLLYVGMSHMLGPIQLPLPRIIHYTYHPLNFALIQFILATIILILGRRFFTRGFKALIHKAPNMDTLVAVGTGSAYIYSLYSLVMIMQGDVHAVHKLYFESAGVVVALVQFGKHLESLSKQKSTSAISALLQLRPSTATLWKNNAEFEVALDEVLPHDHLVVKAGEGIPVDGVLVEGSAHVDESMLTGESVPVKKKSGDQLIQGTINMDGRIVMECTATQEETTLAKIIQLVEDAQAKKAPIARIADRISLYFVPMVMLIAVIAFLAWYLATQDFAFALTIFVSVLVIACPCALGLATPTAIMVGSGKAAQSGIFMKSAEALEITSHIDTIVFDKTGTITIGKPVVTDCITNAKQADVLRLAAALESGSKHPFAHAILTAAKQHQLKPWSVKDIQTKNGKGLAAYDEGVEILVGSRRFMEENKVDISAYIAEAQKLLAQGKSVVWVSRGEAAFGILGIADEIKPKVREVIERLTKRGIEVYMMSGDHRLSAQTIAKQAGISHVIAEVLPQQKGEEIQKLQAQGKKVAMVGDGINDAIALTQAEVGIAIGSGSDVALESADIVLMKDNIEDVETAIRLSAAVIRNIHQNLFWAFFYNSLGIPLAAGVFYAFGGPLLSPVFAGGAMALSSVSVVSNALRLKKFH

SEQ ID NO: 335 - protein, 439 aa, Bacteroides fragilis
MIHKLFPYLCKNYVSMEYKNRIADKLLRDKLEAMGAVLIEGPKACGKTTTAEQQAKSIIYMDDPVKQEQYKQMAQTNIRFLLEGETPRLIDEWQHVPQFWDAIRFEVDHRDDDGQFMLTGSAVPADMKEIHHTGTGRYGWLTMRPMSLWESGESTGEVSLSDLFLTPDRIGALNKLTLPMLAFAACRGGWPKSLQKKTEKAALSQVTEYYKAITNSDISRVDNVKRDEERAKRIMRSYARHQGSQASIATILADISTNDTGNISDETVGAYLTALRKIFVIEDMPAWNPNLRSKTAVRTSDTRYYVDPSLGVAALGLGPNDLVNDLNTFGLFFETMCIRDLRVYADALDGSVYHYRDKNGLECDAVVHLRNGAYGLIEIKLGGEKLIEDGAKTLTALTNIIDTSRMKAPAFCMVLTGVGDFAYRRTDGVYVVPIGCLKD

SEQ ID NO: 336 - protein, 805 aa, Clostridium bolteae
MQVSSIADYRMAVKHDGTITLATGRSRMEKNWKNKSYSWSQLLKHLETPVRTHETLAEYMKMPKDEQDRIKDVGGFVGGALKGGRRKADTVDSRQLITLDADYAPAGLMEDIALLAYYAYAMYTTHKHSPEKPRLRFVIPMDRPVTADEYEAIARKLAEEIGIDYFDDTTYQPSRLMYWPSAAADGEYLFHYEDLPWLSADNILRRYPDWTDTSYWPESSRAKESRVKQAKKQGDPTEKAGLIGAFCRTYDVEDAIAAFLPEVYVKCDLPERYTYAEGSTASGLVIYEDGRFAYSNHSTDPACGKLCNAFDLVRIHKYGIQDEDAAPGTPTTKLPSYKAMMELVQRDKETTLTVARERAELAREDFADTCDTEEDDSWKGRLSKDKKGLEPSLNNLLLIMRYDQGLKGIRFNQMADNLEIKGPVPWKSQSRFWRDADDAQLEAYLSMTYTEFPKAKILTAITKAADDRSYHPVREYLDGLPEWDGIPRVDTLLIDYLGADDTEYVRSVTRKTLCAAVHRVKYPGCKFDTVLVLCGPQGIGKSTLISRLGGQWFSDSLNLADTRDKTAAEKLQGYWIIEIGEMAGIGSAGVKTLRGFITTQDDRYRASYGRRVSSHPRQCILIGTTNSEEGYLNDVEGGRRFWPVRVPCIGAKRVWDMTQEEVSQIWAEVLYHVAQGEKLILSGGAADEAVKQQKEAMITDPREEKVRMYLDTLLPEDWYNRDLDKRRDFLYGTECPEPEAVLRRDFVSCQEIWCECFGNSLKNMEPKDTYTIKKILARLPNWENSNERKYIGGEYGRQRGYKRVF

SEQ ID NO: 337 - protein, 516 aa, Bacteroides fragilis
MLDSAIKEQLRTIFAALEANYTFDITVSPQHESRTELLELLNDVASCSEKLSCRINEGKGLEFTLLKGEHRTGITFRAVPNGHEFSSLLLAILNTDGKGKNFPDEGICNRVKSLKGPVRLTTYVSLTCTNCPDVVQALNAMTTLNRQIQHQTVDGAINQAEVEALKIQGVPSVFADGKLIHVGRGDFGELLAKLEEQYGTETNSAETSIKKYDVIVAGGGPAGSAAAIYSARKGLNVAVIAERIGGQVKETVGIENLISVPSTTGSQLADNLKTHMSQYPIDLLEHRQIEKIELDGKDKVLTAKGGERFSAPAVIVATGASWRKLNVPGEAEYIGRGVAFCPHCDGPFYKGKQVAVVGGGNSGIEAAIDLAGICSKVTVLEFMDELKADQVLQEKLKSLPNVEVLVHSQTTEVVGNGDKVTGIRVKDRKTEEERVISLDGIFVQIGLVANSGIFRDVVEVNRPGEIVIDAHCRTNVPGIYAAGDVSTVPYKQIIIAMGEGAKAALAAFEDRMRGEI

SEQ ID NO: 338 - protein, 160 aa, Parabacteroides merdae
MPSEEMVFMKRMIFPFLIKVRPSLRDSAFSLRFPAENFRTAKFSAGKTLRKRRDGRKRDSEGENCDRRSACATRKRTVREPLFMPYPGMKPLFSPAVVKALLLPLHCICGLFCPYPRPPVLPALSLRKTAYRNGWRDTDFSGYGGTFRKKEWKTGYYLAV

SEQ ID NO: 339 - protein, 160 aa, Clostridium bolteae
MAFDIAKEHLRKAGLEDRIYEFEVSSATVELAAQAVGCEPARIAKTLSFMADQKAVLIVAAGDAKVDNHKYKEQFHTKAKMLSPDEVTELVGHSVGGVCPFGVKEGVAVYLDESLKRFDVVYPACGSASSAVKLTIPELETASGYLGWIDVCKGWGEDSI

SEQ ID NO: 340 - protein, 451 aa, Bacteroides uniformis
MEQTKNEPKNENKAAPDNGKPKKERKPLTEAQRLKRQKMIVLPAIVLVFIGAMWLIFAPSSDKEQQPGTGGYNIEMPDADKANRQIIGDKAKAYEQGAMEERQENRSRAMQELGDMFDREVAETDGGRDFDLANPGNAEDATAKSSAPKTIQSSAAAYRDLNTTLGNFYEQPKNDNAEMDELLERIASLESELETEKGKASSMDDQVALMEKSYELAAKYMGGQNGTQPPVGQAAEPYHVQKAGKNTAAPVRQVTHQVVSSLSQPMSNAEFVASFSQERNRSFNTAVGVTTVSDRNTISACVYGAQSVTDGQAVRLRLLEPMAVADKIIPRNAVVVGTAKIQGERLDIEITSLEYAGTIIPVELAVYDTDGQPGIFIPNSMEMNAVREVAANMGGSLGSSINISTNAGAQLASDLGKGLIQGTSQYIAKKMRTVKVHLKSGYKVMLYQDRD

SEQ ID NO: 341 - protein, 1657 aa, B theta 7330
MSYNKLKSLVANVEAIKTALQIHIQGRQATPEEKETLSQYSGFGGIKEVLNIGTDKPVSGDMEEPIRRLQELIDTYPYFTEAMKASVLTAFYTPKFLIDVVAKQIHATFKDNELQMRSFLEPSAGIGGFLPVAMSDTCGYAIEKDPVSGLILSLLNDNTVTRTAGFETIDEQGFEHTKFDVIASNIPFGNFRVFDAELWKKGGIYEQATKTIHNYFFVKALELLNEGGLLAFVTSRGVADTPSNKFVREYLVNHADLISAIRMPDTLFMYTSGIEVGSDLLIFQKHTHKAALSQREQLFLQVGREKADTTGAMTEYANKLFTLPKTTLATGSRIAMNQYGKYVRKYQWQGDENAMSQYLAALLKLDFGRYFRKSLFTSEGQDGIHTQMSLFGSVAVKQPPKGRRAYTDEPEAWMKEGAMVLFEGQVGIIRYRKSELYQETATDFVPVDEGKVNTERANDYFSIRKAYFELAIKEQEEQTEQPHLRERLNACYDAFVAKWGFFHSNDNKEFIMLDSLGVEVFTIEMQVKGDIFKSDIMREPVAFKKIDTTVQLTPGEALASCLNFYGCVDMDYLMQTTGKDEDEVIDDLKGEIFYNPATGEWEHKGKFIAGNVIAKSKETGSYLPDLTGKEKDWTETAVKALEEAIPEAIPYEELDINMGERWIDTKLYADFATELFGTETDVMYFDVNDTYLVRLQGYSPVVYNTYSVKNYNGEDLFVHALQDTVPEITKEIERNGEAVRVPDEEAIQEAATKIQEIRNRFNQWLDCQPIEVRDELVRVYNERFNCYVRPHYDGSAQTFPQLSFENFPYDSLYPSQKDAIWMIKQNGGGICWHEVGTGKTMIMCVSAYEMKRLGLVQKPLIIGLKANVHEIADTFRKAYPSAKVLYPGKEDFTPANRKEVFSKIKNNNWDCIILTHDQFAKIPQSEQTMIDIFTEELADVERNLEVLEQSTMRYRSGKMQDGLEKRKQNLAAKLKELKMKINERKDDAVDFHSMGIDHIFVDECHIFKNLIFQTRHTRVAGIGNTKGSQRAMNLLFAIRDIQHRTGRDLGATFLSGTVVVNALTELYVMFKYLRPRELQRQQISCFDAWAAIFTQKTADYELNVTGAIKRKERFRTYIKVPELAMFLREITDYRTADMINLDVPDKNVRFLSHAPTIQQEEMIGRLVSFAHSGQWEDLGLDTPEPDNLDKAKMLVATNVARKMALDMRLLGDKFSDDAENKASICARTIYEYYMRSNENRGTQFVFSDLGTYKPNEWNVYTDIKEKLVNLGIPTDEVQFIQCATTERARKRLFEDMNNGKVRVLFGSTTMLGTGVNAQQRAVAVHHLEIPWRPADMEQRNGRAVRKGNTVKLWGGNVVDVVIYGTEKTLDAYKFNLLKNKQMFINQINNGTIAVRRIDEGGMDEDNGMNFAEFVAILSGNTDLLNKAKLDNKIMQLEKEQTIFKKERIRAERKITAGQEDMAKTQRTKAGFIKDWEYFNSYEGTKVTQLLNLPQATAEETGRELHRIAKTYRSGAYGTIGTFTGLNLLVRSEYSINGTFDRNTFFVEGTSGLKYRCGLTGALPLGFVESAQYPQATLNKLPSLIEKQQKTVERIESEIPILQDIVGRQWSKADELVKLKLECKELQRKIDESLKDAERSLTPSETTAAEYEPTTKAA

SEQ ID NO: 342 - protein, 1043 aa, B theta WH2
MKNSKNLSLFGRTGKLQRLFLIALFSVLAIGAYAQSKTVSGTVVDQTGEPIIGANVVVKGTTNGIITDLDGRFTLSNVPDKGTISISFIGYQDQEISVAGKTNLQVTLQEDNAMLDEVVVVGYGVQKKSDVTGAMARVGEKELKAMPVKNALEGMQGKTAGVDITSSQRPGEVGGINIRGVRSIDAEQGPLYVVDGMIIQTGGIENINPSDIEAIDILKDASATAIYGSRGANGVILVTTKKGKQGKVTLNYSGTVTFETLHDVTEMMSAAEWLDYARTAKYNMGSYASATPDYTADKAIFGSVAASWANIEQAWSNGTYDASKVGSYDWAANGKQTGITHEHTLSASGGSEKFQGYASFGYLNQKGTQPGQAYERYTLKTSFDINPIDFFKMGTSINASYSDQDYGYNFSKSVTGSGDLYNALRSMLPWTVPYDSNGDYIRNPNGDVNIINPIRELDYNTNQRRTFRANASMYAQVDFGKIWEPLEGLSYRLQFGPEFQYYTLGIANAAGGINGDGNNGAQYKNEQKRSWTLDNLIYYNKRFAEHHNLGLTLMQSASAYHYEMGDMRATNVASADELWYNLGTAGTLSSFGTGLTETQMASYMVRVNYGFKDKYLLTASMRWDGASQLAPGHKWASFPSAALAWRIDQEDFMKDINWLSQLKLRFGVGVTGNAAIDAYATKGAITGLYYNWGQTDSSLGYVPSDPSAKDPAKMANSELGWERTTQYNLGIDYGFFNNRLSGSIDAYKTKTNDLLLAMSIPSLTGYTSTYANVGKTSGWGIDLQVNAVPVETKDFTWNSTVTWSMDRNKIDELSNGRTEDVNNNWFVGEEIGVYYDYVYDGIWKTSEAEEAAVYGRKPGQIKVKDLNNDDKIDATNDRQIVGHIRPRWTAGWTNTFNYKNFELSVFILSRWGFDVPQGSLTLDGRYMQRKIDYWVAGTNENAEYYSPGSNGEAADTYSSSMGYQDGSYIKVRNISLGYNFTTKQLKNTGLSNLKVYVQAMNPFSIYKACDWLDTDLMNYDNNKKTFGSPTTIKSFVIGVNIGF

SEQ ID NO: 343 - protein, 385 aa, Bacteroides capillosus
MTKKYCIFITALFCVFLGVLTTATAISPDREKSELENRSLQQLPTLEASDFKLAWPIEESGDFFTGKFMSTFETYCNDQFILRDNWVALKSTSERLSGKQENNGVYFCDKDTLISRFDQPDQKRVDTNVGYVNQFVANAGVPVYMSLIPGAVSIWADRLPEGAPNADQKAVIDSIQGASDAIWYDSYQQLWDHRDEDVFYRTDHHWTSLGAYYGYVSLMNALGMEPVSLDSYTKQTVSDSFYGTVFSSSGVRWVEPDDIDIYVPDPGVEVTSWFTGEPEVGTLYNWDKLDIKDKYTFFMGGNQSLGVIKNPNVDGPKILILRDSYTDSLVPFLTQHFSEIHLIDLRYYRYSIPQYIKDNDIDMAVVLYSVSNFVTDTNLFTLRQP

SEQ ID NO: 344 - protein, 292 aa, Clostridium bolteae
MRRTMLFLPGNNPNMIMNGGLLGADSIIFDLEDAVAPDQKDAARILVKSALRSLDFGGCEIIIRMNALDTPYWEEDIEEMVPLGPSAIMPTKVSDGDYIRKLEQKITETEEKNGMDVGKIKLIPLLETAMGIEHAYDIAIASPRMEALYLGAEDLTADLRCERTKEGAEILYARGRLVCAARAAGIEAYDTPFTDVEDMEGLRRDARFAKGLGYTGKAVINPRHVEDVNCIFSPSDKEIRYAREVFGAIREAKRQGKGAISLRGKMIDAPIAQRAKLVLEAASELKGVNYFE

SEQ ID NO: 345 - protein, 332 aa, Bacteroides capillosus
MPKIKDTDYLFLSTRIKSMERNLLNGERLERMLEARTPEDAVKVLTECGWPDMPRVDLDELDRVLTQERDKTLKDLTSSAPHPEILEVFKVKYDYHNIKTLLKAEAMGTDAERLLVSAGRVKVEELTEKLRSGDLRGLPGILQSAAGEAREVLGTTGDPQLADFVLDRACYADMADIASKSGSAFLAGYVRITVDAANLRSVVRTLRMGKGAEFLKGVLFRGGNVDTGRILSAVTSGGSIEEIYTASSLREAAAAGAAAITGGRLTHFEKLCDDAVTAYLAGARYVAFGEAPLIGYLAARETELTNVRVILSGRLAGLDADTIRERLRESYV

SEQ ID NO: 346 - protein, 342 aa, Bacteroides capillosus
MKLAMAAFTARGAALGRQLAAALTAEGEACSLAVPARLAPELDLPAMDSLADWTAREFARADGLIFVGACGIAVRAIAPHVKDKLTDPAVAAVDEAGRWVVPLLSGHVGGANDLARRIADLTGGQAAVSTATDVNGLFAVDQWAARQGFAIEDRTAAKAISAALLAGETVGFASEFPVDGALPKGVTAGEANIGFSVSAKTEALPFGTGLRLVPRVLRLGIGCRRGTTEEAIAAAVDTALAEHGLSAKAVAGVGTIDLKKDETGLLAFCEHRGWKLNCYSAEELLRAEGEFTPSDFVKGVTGVDNVCERSAVMGGGQLVIRKRAAGGVTVAAALLPLRLTFD

SEQ ID NO: 347 - protein, 593 aa, Bacteroides fragilis
MLFLLVTNNMCAQLGKAVREILTGDSVATRTAVRNDSDSVRMADMKKELEEARLSEANMRMEMEQMRLKAFAADSVKLAQQRARIDSLRQFTPGVPVVVEGDTLFYLYTKRGGYTPLQRAEMIDAAIMQLGKRFTLHPDSVYIESSDIVTDLMYGNKVIASFTDQDGLWEGRSREQLATDKRKIVVQKLKELKEEHSLWQLGKRILYFVLVLAGQYLLFWLTGWLFRKLKVRIQKLKDTRLKPISIQNYELLDTQRQVNLLIFLSNLLRYVIMLLQLLITVPLLFAIFPQTKGLAYQIFSYIWNPIKNILVGIVDYIPNLFAILIICFAVKYLVRLVHYLSREVEAGRLKFGGFYPDWAMPTYHIIRFLLYAFMIAMIYPYLPGAKNGVFQGISVFVGLIISLGSSTVIGNVIAGLVITYMRPFKLGDRIQLNDTTGNVIEKTPLVTRIKTPKNEVVTIPNSFIMSSHTVNYSASAREYGLIIHSEVTIGYDVPWRQVHQLLIEAALNTPGVIDDPRPFVLETSLSDWYPVYQINAYIREADKLAQIYSDLHQNIQDRFNEAGIEIMSPHYMAMRDGNESTIPKDDLRPKTDK

SEQ ID NO: 348 - protein, 187 aa, Eubacterium siraeum
MSELTKRAIQESFKKLLSNQPLDKITVKNITDDCGVNRNTFYYHYSDIYQLLEEIFLTEAQKSVEKMEVGQSWEEGLKTGLCFVKENKKLIYHVYNSLHRETIERYLYSVSLDFAGKFIDNVSKTLELSVSDDDKKFIASFYKYAIVGIVLDWLEGGMKSDPDELIERMSKLLSGTLKTVLENAVKK

SEQ ID NO: 349 - protein, 496 aa, Parabacteroides distasonis
MKQHLRPIMFVGTCSDAGKSVINAAFCRIFKQDGYQPAPFKAQNMSLNSYSTPEGGEMGRAQVVQAEACGISPHTDMNPILLKPTNDKSSQVVLNGKPVGNMSAKDYFGIQNQKEELFKEAIEAFKRLEARYNPIVLEGAGSISELNLRDRDITNMRMAIAAGASTYLVADIDRGGVFGSVYGTIALLRPEERVLMKGVIINKFRGDASLFEEGRSLLKELTGIPVVGVIPWFRDIKIEEEDSVALDMKNNTYKDGKINVAIILLKRMSNFTDFDVLEMDPRFNPYYTNNIDEIEKADIILLPGSKNTLSDLQSLRANGIAMAIIRAHKAGKKVIGICGGYQMMGVRLEDPESIEGNIPAIPGLGLLPQCTVIEQEKITRQSDFAFLPSSENKDCKGYEIHMGRTTLLGDAPEQPVARLEDGRTDGYYLNNRCWGSYMHGILDNPAVLDNLAEGFDTETTTGPFDYAAFKEEQYDKLAALVREHVDMEYIYNSIKN

SEQ ID NO: 350 - protein, 309 aa, Parabacteroides distasonis
MINKYKVSENRLSIMEIERFAVHDGPGIRTVVFLQGCPLHCSWCSNPESQKRKPHLLHIKNKCIGCGRCEAICPRGNISIQDHFPVFNRQACVACKACERICPQNAIKFVGESITSSEIMEILLRDRDYYLNSGGGVTFSGGEAFTQFEGLMDLLIQCKNEKLHTSVETCGQVNLDKIKQALPLIDLFLFDIKHTDKDLLQKETGANLDTILTNLRYISSKSANKVTIRVPVIPGFNFNENTLREIFMLAKENRIKCVHLLPYHTLGKDKYEQLGLTYPYSCEQMLAKEELFPFKEMGEKMGLEIRIGG

SEQ ID NO: 351 - protein, 160 aa, Bacteroides capillosus
MELQNLIGTGIAFIGACLAVGMSCAGSGRGVGIAGEAAAGVVSEDPGKFAKTLILQLLPGTQGLYGLVIWFWAIFNMGLLSGVPTLDTGAGIAVFGACLPMAIGGYVTAVAQGRCAAAGIGIVAKRPEQASKGILMALMVEFYAILCLLASFLMIFFFTA

SEQ ID NO: 352 - protein, 569 aa, Bacteroides capillosus
MLSVERTASGEVWESVVPQPVPGQTDPLPWNLVKGPYASNLHDQFGAYDQRFVVLEFDMEVEALPGKSGLLMAIQGEGGAEPSETESALTSFASVIVRTTPSGADAKIDLFSGTWVGGVTVPVGQPYTLKVVIDRVSQQYKAYVDCGNGLQDVYPSAWAKFRNSAVLTDISRIYLGGGDTDAENGKIVINALRAGQTDGAVNIPVYAMDTDGNPVAGLDYQGEGILYGTHTAGIGSATTVEAPAAPDGYRLVGESTVSIGSVRAGTVVVFRYAKSEEIPTAPTNSVTVNDTANGTVTVNDTANGTVTVNDTANGTVTVNKNYATMGSTVVITATPAEGYVLDSLKVADAKGAEVSVKMLEEGRYAFTMPGSKATVTAIFTATSSETGTGFTDVPSDAWYAEAVKYVTEQGLMNGTSETAFSPMLSMSRSMLVTVLYRLAGEPDAGECAFTDVASGTWYTDAVAWAAANGVVTGTTTTTFAPDAAITRESLAVILYRYAEMKEQAQGEKGDLTAFADGASVSDWAAEAMAWAVGEGILTGKSGNTLDPQGTATRAEVATILMRFCSMTEK

SEQ ID NO: 353 - protein, 241 aa, Bacteroides capillosus
MLRIKNNFKSIFTKKGHVFQRLRILWRRKEEVEHMAMSAIWTAMVVISILCGLATGREAEVAAGAVEGAAAAVELCLAMAGLLCLWMGVMEIMKRSGLSEKLSALLRPVLRRLYPDFAGDRAVMDAISANVSANLLGLGNAATPLGIQAAQRMSKKTPGVASDSLCMLVVCNTASIQLIPTTVAGVRAAAGCAAPFDILPAVWLASALSVTAGILASKTLSRFWRLREGRNTQGRRETPWS

SEQ ID NO: 354 - protein, 300 aa, Bacteroides capillosus
MLGRRTDLALEAKAIWEEGARGGELRGVTTRETEREGFAVTRVDIVDDQGARALGKPCGAYVTVELDGLERREQDAFGRAARAVAAELSALLKLKPGESVLVVGLGNRAITPDAVGPLAVEHTMVTRHLVEKLPEHFGSFRPVSALAAGVLGTTGVESGELAAAMAGAVKPARVVAVDALASRSLSRLCRTVQIADTGIVPGSGVGNARAALNEETLSVPVIAVGVPTVVDAATLCADVLAEAGRPGLDPGALGDSGRGVIVTPREIDSQVADISKVIGYGLSLALQEGLTVADVDMFLS

SEQ ID NO: 355 - protein, 661 aa, Clostridium bolteae
MTMNVDIETYSSIDIREAGVYAYASAPDFEILLIGYRYDGQDVKVIDLTDPLADPERDFPDFWEGLYSPDVIKTAYNANFERTCLASWLGRPMPPEQWRCTAVHAATLGLPGTLGGVGEALGLPEDKQKDKIGKSLIQYFCKPCKPTKTNGMRSRNLPEHAPDKWQLFIEYNRQDVVAEATIREKLQIYPVARQEQELWNLDQHINDHGVRLDMDLADKIIQYDGIYQERLKQEARKLTGLNNPNSLPQLKMWFFMTYGLDVPSITKDSIPVIEAQLKELKTTHDVLPGLRMLQIRKELGKTSVKKYQAMRHAVCPDGYLRGILQFYGANRTGRWAGRIVQVHNLPQNKIPDLDLARDLVKQEDFDTLELLFEGIPFVFSQLIRTAFIPSEGYRFVVSDFSAIEARVIAWLADEKWRLNVFRTHGKIYEASAAQMFHVPIENIKKGSRLRQQGKVAELALGYGGGFGAMKAMDKAGTIPDDEIPMIIANWRKASPNICKLWRNAEAAARAAIEERRTIKLKHGLSFSYINRILFIGLPSGRKLAYYDTRIEDDEKGKSVITYAGVDQETKKWGRLKTWGGKLVENIVQATARDCLAVTMERVSGAGYQIVMHVHDEIIVDVPETDIDALEKITAIMAQPVPWAQELPLRGDGYETPFYKKD

SEQ ID NO: 356 - protein, 1439 aa, Bacteroides fragilis
MFKAIVRFSIKKKLFVGLTTLFLLIGGIYAMLTLPIDAVPDITNNQVQIVTVSPTLAPQEVEQLITMPIEIAMSNIMNVEDIRSVSRFGLSVVTVVFKESVPTLDARQLINEQIQSVAGEIPPELGMPEMMPITTGLGEIYQYILKVEPGYEDKYDAMELRTIQDWMVKRQLSGIPGIVEINSFGGYLKQYEVAVDPDALFSLNITIGEVFEALSKNNQNTGGSYIEKAKNAYYIRSEGMISRTKDIEQIVVANRNGIPVHISDVGIVRFGAPKRFGAMTKDGKGECVGGIAMMLKGANANVVTQELEKRVEKIQKLLPEGVSIEPYLNRSELVNRNISTVVHNLIEGAIIVFVVLIIFLGNIRAGLIVASVIPLAMLFAFILMRIFGVTANLMSLGAIDFGIVVDGSIVIVEGILAHLYSNKLKGRTLSGTEMDEEVEKGASGVVRSATFAVFIILIVFFPILTLSGIEGKYFTPMAKTLVFCIIGALLLSLTYVPMMASLFLKHTIMVKPTFADRFFEKLNVIYQRCLHFCLRFKWQTVTVAFATLIGSFLLFGRLGAEFIPTLDEGDFAMQMTLPAGSSLSESIEVSNQAEKLLMDRFPEIKHVVAKIGTAEVPTDPMAVEDADVMIVMKPFKEWTSASSRAEMVEKMKEALQPLENRAEFNFSQPIQLRFNELMTGAKADIAVKLYGEDTHELYAKAKEAARFVEQVSGASDVIVEQTMGLPQLVVKYNRGKIARYGINIEELNTMIRTAYAGEVSGVVFENERRFDLVVRLDQEKVADLNLDKLFIRTSEGIQIPVSEVASIDLVNGPLQINRDATKRRIVIGVNVRDADIQQVVSEIQQILDKNIKLQPGYYFEYGGQFENLQNAIRTLTIVIPVALMLILLILFFAFKNVTYTLMVFSTVPLSLIGGILALWLRGLPFSISAGVGFIALFGVAVLNGILMINHFNDLRKQNKYAMTTNQIIKRGTPHLLRPVFLTGLVASLGFVPMAIATSAGAEVQRPLATVVIGGLILSTILTLIILPVFYKIVNAASAGWKQPKRRLHLFILLPALLLSATATAQAPQTVSLEQAIEIAKQNHPRLKIATTAIRQAQAGRGEIVEATPTTFNYSWGQLNGENKKDKEMAFEQSLGSLLTPFYKNVLINRQVQTSTYYRQMVEKEITAEVKRAWAYYQYASGMSSLYHDQDRMAAELRRIGELRYEQGEITLLEKNMMTTLAADLHNRLFQALEEKKVALARFQWSCYADDPITPKDTIMTLFPTDCEQRSTSEAHLGFFNSQASEARAILNVERSRFFPELSIGYSRQDILPLKNLNAWMVGVSFPIYFLPQKSRIKQAKLAVSAAQIQAEANIRELNNKITELSAALQRYEESLRFYTSSALKEADELVKTANLQLQHSETGIAEFIQSVSAAREIRKGYIETIYQYNIASLEYELYQ

SEQ ID NO: 357 - protein, 245 aa, Bacteroides capillosus
MEQKTALITGASRGIGAATARRLARAGYAVAVNYCSSEERALALVEELRAEGHTAMAVRADVSDPEQVRTMVDNVLDKFCQLDILVCNAGRSWVGLLGDMTVAEWRELFSVNLDSVFYCCKAVLPHMIHRKKGKIITVSSMWGQVGASCEAAYSASKAGVIGLTKALAKELGPSGIAVNCVAPGVIDTEMNKNLTDEDLDALREETPLERIGKAEDVAESVLFLASEGADFITGQVLCPNGGLII

SEQ ID NO: 358 - protein, 150 aa, Anaerotruncus colihominis
MKPMNMTPEEYNELTKQSSPRSPFIKDFLMAFAIGGLICALGQAIMMAYQSSGMTEEVSGSVTSVTLVLLSIILTGFNIYPKIAKFGGAGTLVPITGFANAVASPALEFKSEGLVLGLAAKMFVIAGPVIVYGTSASIVYGLIIYLFGLY

SEQ ID NO: 359 - protein, 367 aa, B theta WH2
MKQFIAFVRKEFFHIFRDRRTMLILLGMPVVQIILFGFAITTEVKNVRVAILDPSNDVVTRRIIDRLDASEYFSVTTNLNTPDEVEKSFRRGDIDLAVIFSEQFANHVYTGDACVQLVADATDPNTATTQTGYAANIISSAGREMLPAGMQVSTIVPEVKLLYNPQMKSAYNFVPGVMGLILMLICAMMTSISIVREKETGTMEILLVSPVKPLFIILAKAVPYFVLSFVNLTTILLLSVYVLDVPVAGSLFWLIVVSLLFIFVSLALGLLISSVTRTQVAAMLASGLILMMPTMLLSGMIFPIESMPLLLQGISAVLPARWYIQAVRKLMIEGVDISLVLMEVSILAVMAVALITVSFKKFKNRLE

SEQ ID NO: 360 - protein, 174 aa, Bacteroides capillosus
MAESAKWYVVHTYSGYENTVAASIEKAVENRNMHDLIQEVSIPLETVTEITDNGPKTVERKVFPGYVLVKMVMTDETWHLVRNVRGATGFVGSGNKAIPLSDEEIAALGVEKREVVIGYAVGDNVRITDGALKSYLGTVDEIDMEHEKVRIVVSMFGRETPVELDLDQVEPVEL

SEQ ID NO: 361 - protein, 403 aa, B theta 3731
MRSTFKLLFYINRNKVKSDGTTAVLCRISIDGKKSAVTTGVYCKPGDWDSKKCEIKTARENNRLAAFRSRLEEAYGNLLRNQGVVTAELLKTTVSGANSVPEYLLQAGEVERERLRVRSKEINSTSTYRQSKTTQLNLRQFIESRGMKDIAFSDITEEFAESFKVFLKKELGHRNGHVNHCLCWLNRLIYIAVDREILRGNPIEDVAYERKETPKLRHISRSELKRMMETPLPDPMMELARRTFIFSSLTGLAYADTRALHPRHIGTTSEGRRYIRIRRAKTDVEAFIPLHPIAGQILELYNTTDDDRPVFPLPVRDVLWYEAHGMGVALGMKENLSYHMARHSFGTLTLTAGIPIESIARMMGHTNIDSTQVYAQVTDRKISSDMNRLMERRKPAAGKEAAG

SEQ ID NO: 362 - protein, 319 aa, B theta WH2
MMQPVYINHIASIHADTASGESPYLSANEPDYKSIITNAALRRRMSRIIKMGVACGLECISTLPSEKVHAIITATGLGCLADTEKFLNTIIENEEQLLNPTPFIQSTFNTIGAQIALLRQIHAYNMTYVHRGLSFESALLDGMMRIWEGNENVLVGAIDEITPNSHAIQQRLGLLRGIQAGEGAQFFLLGRETTESTLAELAGISTFIHASSTQEVAEKIHRFLQSNRLTAGQIDWFVTGKNGNLKEDTLYTDLENSLFPTATCTTFKNECGEYPTASSFALWKVAKTFEENLNPGQTVLIYNHYHSINHSLILIRKKQ

SEQ ID NO: 363 - protein, 231 aa, Parabacteroides distasonis
MITRLLLLAMLLPLAGLSQVQAQADGRYIEVTGTSEIEIVPDRIHYIIEIREYFEEEFDGRSKPEEYRTKISLDRIEQGLREVLHDAGISPNAVRTQEIGDYWRKQGQDFLVAKTFDITLLDFKQIDEILKRMDTKGIHTMRIGELENKDMLSYHQKGKIAALKAAQRKASYLVEALGKKLGPVIRIVEDEAGSSLPFSQSNVLSSSVVSFDSFRTIKKKYSMLVRFEIAD

SEQ ID NO: 364 - protein, 581 aa, Bacteroides fragilis
MKTTRLQLSLLALFLGCASLQAQYKWADPLKQDFHTVRGQAWQDELKDSYARLPQRAEDKVRKPLWDLSRQSAGLSVAFRSNASEIKVRYVVKGGLSMPHMPATGVSGIDLYATDNNGQERWCAGNYSMGDTIVYNFRGLSYAAKSGNEFEYQLFLPLYNSVSWMEIGVPADASFRFLPVSQEKPLVIYGTSIAQGACASRPGMAWGNILNRKLGHPVINLGFSGNGKLEEALFDLLSEIDARLYIIDCMPNLAGKEASAVVYQRTLEGVKKLREKSQAPILLVEHDGYSNEFSSESAEESYRVANAELRKAYETLQKEQVPTVYYLTKEEIGMPMDAMVDGVHSTDLGMQQYADSYRKKIGEILHEESEGPTSCIPCKQQRDPYDWYGRHEEILKLNKQSAPEVVMIGNSITHFWGGEPIAHNQFGTESWDRLFKGKRVRNLGFGWDKTENVLWRIYHGELDGFQAQNIFLLIGTNNLLFNTDDEVIEGICRVVKAIRERQPRAKLCVMGILPRKEMETRIAQIDAALQERLNGKDCTFINLAPQLTHKDGTIDHSLFRDGLHPNAEGYKRIAKVLKGYL

SEQ ID NO: 365 - protein, 289 aa, Clostridium scindens
MDLRKWSVLLAVVDYGSFTKAGEELNYTQSGITHMMKSLEQEVGFPLFNKGHHGVSITKEGKALLPAIRNLLSANESLNQEISFLKGAKKGTLTIGTYISCSIHWIPEIIQEFQKEYPGICFEISEGHEGDLIDWVENHKVDIGFISYHEHQPYEFIPVCDDPMMAVVPKGHPFAQYDEVPIEWFENAPFVCSEYTYGNDVHRILKTAGIKPDIKYTTSTDFSILSMIEHNLGISILPELVLRGQSGNFETRPLKPLSYRRLGMAVSSFRDMSPAMRVFIKYARDYLLS

SEQ ID NO: 366 - protein, 77 aa, Bacteroides capillosus
MAEKKLTFEQAMARLEEIVSKLEQGDAPLEDALALFEEGTSLMKKCSTMLDKAEQKVIKLTAAPDGTPVEQPMDQGV

SEQ ID NO: 367 - protein, 273 aa, Ruminococcus gnavus
MAEVKWIKITTDMFDNRKIKHLRKLPDGNNIVLIWVMLLTMAGRCNSNGMVFLTQNIPYTPKMLADELDFEENTVKLALQSLEQLEMIVMDNGFFSIPGWEEHQNAEALEKIREQNRIRKQKQREKQKIECVTEMSRDTSVTNLGSHATDKDKEEDKDIDKERDIRGNRVDYQQIADMYNATCVSFPRLTRLSEKRKRAIKARLRKYSIDDIQRVFEIAEESDFLKGENNRNWSATFDWMMNDTNMAKILDGNYKNKNIKPTKPPVGECGTGE

SEQ ID NO: 368 - protein, 201 aa, Anaerotruncus colihominis
MLKRIVVLVSGGGSNLQALIDAQHSGVLKSGGIVRVISSKPDAFALTRAARAGIETQVLCPGDYETRAAFDTALLAALADARADLVVLAGFLYVLGPQVVKAYPRRIINVHPSLIPSFCGDGFYGLRVHRAALDYGVKVTGATVHFVNEITDGGQIILQKAVDVLEGDTPEILQKRVMEQAEWVLLPQAAELVCQDAVEER

SEQ ID NO: 369 - protein, 402 aa, Bacteroides caccae
MFNLNKFIGDHVTFRSTSMFEVDIQANAETLTREIKGKKVCVIGGAGSIGSSFIKAVLRFEPASVVVVDLNENGLAELVRDVRSTEGLFVPDEFRCYTLNFADPIFERIFREEKGFDIVANFSAHKHVRSEKDKYSVQALIENNDIKAKKLMDLLTVYPPKHFFCVSTDKAANPVNIMGASKRIMEDLVMAYNTHFKVTTARFANVAFSNGSLPDGWIHRLQKKQPLAAPSDVKRYFVSPEESGQICMLACILGNGGEVFFPKLGEDQMLTFSAICDDFVKAEGLTKVECGNDPEAKKYAAEMDYDTENYPVVYFKSDTTGEKAYEEFYVPGEKINMERFSALGVVEQTTRRNMEEVNTFFTELEGIFQSANFTKAQVVEAIKTFIPNFEHEEKGKNLDQKM

SEQ ID NO: 370 - protein, 218 aa, Alistipes putredinis
MTKKYRHLLFDLDGTLTDPMEGITRSVQHALRHFGIEVSDLRELCPFIGPPFAESFRTFYGFDDRQTSEAVAVSREYFTEKGIFENRLYDGMDELLDTLTSSGYTLCVATSKPRVFAERILDHFGIAPYFSFVGGTGLDGSLPTKADVIAHVLAGSNITDRGTALMIGDRKYDILGAKTVGIDSAGVLYGYGDRAELEAAGADYILPAIPDLEELLLE

SEQ ID NO: 371 - protein, 326 aa, Anaerotruncus colihominis
MEGADMWYAKMYFSEKKEVFQFDSHGVQGVPSTYKELPFLESLLSFLETDCKELEPLLRRAYENWSLLIDRDDKEAGVRTLMDLGDLGSRHIYLHLLYVRWFERFGRMGITQDRGSREDQEMLEELQSLPKQLPLYQQQVQRFFDLVLDVDKAGRDPQQQASAHYLYDAPKDPSLFSFRPIPLSFEPVEPGRCSPVLYPIHISDMIDYSLRSCVERGITVRRCKNCGRWFPQTGRVSAEYCERPVASGQQTCREAGAFQQWTKKQSDDPVFKAYRKEYKKRFAWIKAGRITDEQFYAWSEQAREMKKKCDREVITLDEFKDWLGKP

SEQ ID NO: 372 - protein, 190 aa, Parabacteroides merdae
MFRNMSTSLFTAEEKRQVRWFVMRAYKNEKMAEDRLKDKEYGLEYFIPKHYAVRTYHGVKSKKLVPVIPSLLFVHASHSQITEFKKRYNFLQFAMWEKSTGVEYITVPDDQMDSFIKIASHYEEDTVYYRPEEIDLKRGMRVCIHGGKFDNVKGMFVRVQGKRNRRVVVLLEGVMAVSAEVHPDLIEVLS

SEQ ID NO: 373 - protein, 442 aa, Bacteroides caccae
MDTNNKCLMKTRFISFLLLLAMSCGAFAQSSYQPTEENLKAREEFQDNKFGIFLHWGLYAMLATGEWTMTNINLNYKEYAKLAGGFYPSKFDADKWVQSIKASGARYICFTTRHHEGFSMFDTKYSDYNVVKATPFKRDIVKELAAACAKHGIKLHFYYSHLDWVREDYPWGRTGRGTGRPDSKGNWKSYYQFMNNQLTELLTNYGPVGAIWFDGWWDQDQNKDFDWELPEQYALIHKLQPGCLVGNNHHQTPFAGEDIQIFERDLPGENTAGLSGQDVSHLPLETCETMNGMWGYKITDQNYKSTKTLIHYLVKAAGKNANLLMNIGPQPDGELPAVAVQRLQEMGEWMKQYGETIYGTRGGVVAPHDWGVTTQKGNKLYVHILDLKDKALFLPLTDKKVKKAVVFKDQSQVRLTKTKAGVLLEFAEVPKDIDYVVELTID

SEQ ID NO: 374 - protein, 191 aa, Bacteroides fragilis
MRKYIAIVIASLALFTGQAHAQRCLPKMQGIEVRANMADGFNPGGNDGGHSFGAALSTYTKKGNKWVFGGEYLLKNNPYKDGKIPVAQFTAEGGYYFKILSDARKIVFVYAGASALAGYESVNWGEKVLHDGSTLHDRDSFIYGGALTLDVEFYVADRIALLANLRERCLWGGDTRKFHTQWGVGVKFIIN

SEQ ID NO: 375 - protein, 400 aa, Bacteroides capillosus
MAKPLDPQKIEAMRRSSARAERRNQKRNQMREEIARNQSGNGVIVIPPQKSAEAPAPFKKLRVAAYCRVSTQEEQQVGSFEMQVHHFTKRIEANPEWEMVEIYQDEGISATTIEKRLGFQKMIADAVDGKIDLILTKSISRFGRNIVDILNNLRTLSALNPPVSVEFETEGITYTGDGKNNLLIALLSALAEMESQQKSEAIKAGIRWRMAEGIYKFSVHNTLGFYRDHFGRLVIEPTEARIVEYIYESCLEGAAPAEIAAALTEQGIKSPMGNDSWSPGTVRSILRNEKYCGDALMQKTYTKDFRTHRSVKNTDLNMYFKENHHTAIIKKEDWLKVQKLLTEKRGTPPKAKLRLLGTRFIVNRLKDGLFKGYLIVDSRWSFAERQEFVKMIQEPQNMQK

SEQ ID NO: 376 - protein, 279 aa, Anaerotruncus colihominis
MTSEIKDILENMTTAAPEMEDYIGEDGLLYCGKCHTPKEAYFPEGKELFGRDRHPAECDCQRAAREQRQAAEEHRRHVEAVENLKQRAFADSAMQQWTFENDNGRNPQTGIARRYAEHWEEMQAENIGCLFWGNVGNGKSYLAGCIANALMEKEVPVYMTNFAVILGDLSPGFTGRNEYISRLCRYPLLIIDDFGMERGTDYGLEQVFHVIDTRYRSNKPLIATTNRPLDELKKPTDTAHSRIYDRLLSMCVPIRFTGVNFRQETAKRKMETMKKLLAE

SEQ ID NO: 377 - protein, 218 aa, Bacteroides capillosus
MIKIAPSLLSADFANLQRDIERVPNADWLHVDVMDGMFVPNISIGVPVVKSLRACTDKFLDVHLMIEKPERYIDAFAKAGADLLSVHLEADLPPAIHRALDRMEENGVKKGIVLRPITGAEAVIPYLKRGLDLILVMTVEPGFGGQAFMSDMLPKIEAIRGYINQYCPDCDLEVDGGIDPATAPLVMKAGANVLVAGSAVFGKPDPAAAVEALRSAGV

SEQ ID NO: 378 - protein, 656 aa, Bacteroides uniformis
MRLKSFFSILAGAALIFSACSPEEYEMGAKTYVSDDLVEGIAYTVTPDANDPNTIHLTSLIKGATPLWVTPSGPSQKTTLDLALPFAGEYSVTFGASTPAGPVYGEPYTFKVETNNFAMLEDPIWANLAGGVGKSRKWVPIDKNFGIGRCSGPVMYMSHTDVKNDGSNITDLMIGSANWAPNWDPGIQSWLIPADDPYFQSYITFGLDAVKGCTVELHRVAASGTTDATGTFNLNVSDPKRPVISFYGGTYSLHNEGFDDVCSNYTNDIKIIECTPYLLQVATMRTNSEGPWWLVWNFISEEAYNDPSIIPTEDPGLLQPAEVQQPAIEDLATKLFTTEINGVTYVGNEARFLINDEEPYDWTWWNGGSAAWESVVKGQYGSSWAPVADASIADYELVLSSTADGYKWDDGTNAGKLAIEDGKLKFMDADGNPVEITVLTATGDKRTVEVKGSEFTVMACDVTSSFQMGVPATTNDKGAVDSYLCANLNYKPIATGPTGPTEIKVDNSKVQILFGDGNPDRLRLQFYNPWGGGDAGWPIDITKVKLKKNQTLKIQYKVLSGITWNEGATPKTVIMDNNIGNAWEDDCYNLAHAVAFDTAEGAVQTVSVTNTTGATVTYEGSSCICIGIQNKGLATVAATEDGQPDVKVEIISMTIE

SEQ ID NO: 379 - protein, 469 aa, Dorea longicatena
MNIFNYFKKKEIDTVDPSFYRKIAEWISWYEGNVRNFSFYKVYSGRGTYKRCRRKSMGMAKKLSEDIADLLLNERVTITLDDDQTDEYVQQVLDDNRFLVMGNDYQERKAFTGTVAYIPYLEDVEITEDGEVLSGRICINYVDAPNIYPVTWNNGRVTECIFAFPHTISRKKYVQLQSHLLENGEYVISNTVLRCESGSQEGTELTEEEWKLLKPFKTLAKEAKTGSAEPQFVIDRLNITNNADQNNPMGVAIFANAIDTLKKLDTEYDSYCNEFELGRKRIFVRPEMLTNEDGSPAFDPDDSVFYALPEDDANGEGLLKEIDMSLRADQHSKAINDDLNYLSLKCGFGTDRYQFGAIGAKTATEIISENSDMYRMIKKHEILLEDALKQLIRIIIRLGMVLNEPLNPDAEIVIDFDDSIIEDKETERNRDRQDVSMGVMSHAEYRSKWYGETLEDAAAKLPEQNQVME

SEQ ID NO: 380 - protein, 1017 aa, Bacteroides vulgatus
MKTFRFVLLLFLVLSISNTAWAQNQTVKGRVIDSKLKEALMGVSILEIGTSNGTVTDLDGNFTLSVPKGAVLRISYVGYLVQEVPINGKTSLDIFLKEDTELLDEVVIVGYGAQKKATLSGSVTSVGGEKLAKTPVTNVSQGLAGRLPGVVAVSNTSEPGYDGATITVRGVNTFGKADPLVVVDGVPGRSLERIDPSTIETMSVLKDASAAIYGAQAANGVILITTKRGKAGKPRVGFTYNYGIAAPTVIPEMTNAVEYATLMNEIDKYAGNKGRYTVDDLRLYADGSDPWGHPDTDWFNETLKSWSPQTYANATIDGGTENVKYFVSVSAKGQDAFYRHSGSNYHQYDLKMNLDMKINKYVDTYVNVTGRMEDRKYPTRSAENIFRMLMRSKPNSPAYWPDGRPGPDIEFGDNPVVICTNQTGYERDKRYVLNGDFGVNIKVPYVEGLTLKATASLDKTFRFRKIWQKPWYLYSWDGTSMDENGQPLLVEGKKGFSDPRLTESMEDNLGVLLSGIASYSHTFAQDHDVNILAGVERITDKGDSFEAYRRYFLSAAIDQLFAGGQDEMNNTGTGYEEARLNYFGRVNYAYKSKYLAEFVWRYQGSYIFDRSNKFGFFPGISLGYVISEEDFFKKKLPFISFAKVRASWGQTGNDLIDPYQYLASYTFNDLMYLTNNGATMNQALKEGVAPNQNVTWETATQKNIGLDLQFLNGDLAFTIDYFHNNRSDILWKRNASVPGTSGLVLPDENLGKVQNQGVDFNIDYRRNFKDFRLGINLNGVYAKNKILFWDEAPGTPEWQKSTGKPIDSGLYYEAIGIFKDQAAVDAYPHWAGARPGDIIFKDVNGDNVIDGNDRVRNDKSRTPRFTGGLNVDLGYKDFDLSFLLQGAMGGVFYQTTESGDFANFLKSFYDNRWTEENPDADFPRTYNRSNEYFINQQNTFWLHKTDYIRLKNIELGYTVPSIWSKKIGVEHLRVYINAYNLLTISPDMKDYDPENTSGSGYNYPLNKVINFGVNLTF

SEQ ID NO: 381 - protein, 1107 aa, B theta WH2
MNFERLVQRTAATLLMSMICLISLAQSRTVSGVVLDSRGDPVIGANIRVVSDASIGTITDLDGKFSLAVPGTAKQLEISFIGMQTQTVSIVAGQPVHVTLAEDAEILDEVVVIGYQTVKRKDLTGSVASVSGEQIAAMPVANAAQALQGKLAGVNVTTQDGRPDAAVSIRVRGGGSISQSNDPLVLIDGVSGSLSDIPGDQIESIDVLKDASSTAIYGARGANGVILVTTKGAKEGRVVVSYNGYAKFNTPTKYMDALNPYDYLAYSWASAASVGGNSYMEPLEKLYGIGRYTTTNSGGIESYRNVKTDNIQKKIYGDSFSHNHDLSVTGGTEKTKVLFGVNYMDEDGMKLASYYRRANVSLKVNQKIAKNLDLSLDTRYTNIKKMGDEGVTNGSGSILSSSYRFRPIATEDILGDLSAMNEGMIENYAKQSQWDRYNPVNRINDKYAPNAQQSLRGILSLNWGIVKGLTYHTDLSLSQTWNQNKEWTGAIINNYLDDNTGEVLYAGNANLEKKNSWGLRWTNTLSYDFTLGKIHRLNILAGHEVSDSGGDGLKASGTYFPANFTKENAFAMINQYDSTKGVGDFSSSVSTPSRILSFFGRLNYNLMERYLLTVTFRADGSSKFAPSNRWGYFPAAALGWRMSEEAFLNDVDWLDNLKLRVSYGEVGNDGINSSLWSQNWEATSDKRYQGAVNGAFLPSYSLGADMANKDLKWETTITRNIGVDFGFFNSRLTGTIDAYWNTTKDLLMKTAIPGITGFTSTYANVGQTSNKGIEIALQGVLVKTRDWNVTAGFNINFNRGKVDKLADNVTGLYGTEWATSSTFPKSDYVLKEGRPVGLVRGLTADGFYTTDDFTYENGVYTLKEGVADVSSAVFPNYHLHNGMNERPAGQLAYPGMAKFKDLNDDGIINDDDVDVIGDMTPVHTGGFNINATYKNFDLGLYFNWSYGNEIYNVNKLAALYGYKEGAVYENKLSIVKDCYKIYDVVNGELVALTTPEQLNAANANAKLPLAYSENGYVSTLGIEDGSYLRLNTLTLGYTLPKSMLQKAGISNLRVYGSIYNVFTITGYSGIDAEVSTSTSTKTYPQLGMDWGTYPRARSFVLGVNLSF

SEQ ID NO: 382 - protein, 167 aa, Bacteroides capillosus
MKFTHRQMTLLQRQGAWRLHRMAKKPKYFIVDAEALPEVFLKVAEAKRMLETGEADTVNRATKVAGISRSAFYKYKDAVRPFNDMLNGRIVTFQIMMKDEPGVLSAVLNIFARTGGNILTINQGIPVSGCAAVTIGAETSGLEEPVEDLMNRVAAQEGVIRCEILAG

SEQ ID NO: 383 - protein, 297 aa, Alistipes putredinis
MLNKVMLSTESRMRGDMQVRFGGRYGKTYCRKAVRRSVPSLRLGRGGNIIALAGVLYASDHVPYLLGKIAEQAPHIRPISFSFRQQASEPSFQHLEVGELTHPALLRYLQERGINIALAKAQCKELHFTHNGKPYFAIGFPNVAGGFEVRNRFFKGCVAPKDISHIRQQGEAREKCLVFEGMMDYLSFLTLRKRNCSNLPDLDRQDYVILNSTANVSKAIDVLHGYGRIHCMLDNDEAGRKAYRELERKFAGRIRDFSDNYKGHKDLNDYLRGIRQKLAVSPPPRTIVKPKKKGLGL
